(19) United States
(12) Patent Application Publication
(10) Pub. No.: US 2016/0208243 A1
(43) Pub. Date: Jul. 21, 2016

(54) NOVEL CRISPR ENZYMES AND SYSTEMS

(71) Applicants: The Broad Institute, Inc., Cambridge, MA (US); Massachusetts Institute of Technology, Cambridge, MA (US); President and Fellows of Harvard College, Cambridge, MA (US)

(72) Inventors: Feng Zhang, Cambridge, MA (US); Bernd Zetsche, Gloucester, MA (US); Ian Slaymaker, Cambridge, MA (US); Jonathan Gootenberg, Cambridge, MA (US); Omar O. Abudayyeh, Cambridge, MA (US)

(21) Appl. No.: 14/975,085

(22) Filed: Dec. 18, 2015

Related U.S. Application Data
(60) Provisional application No. 62/181,739, filed on Jun. 18, 2015.
(60) Provisional application No. 62/193,507, filed on Jul. 16, 2015.
(60) Provisional application No. 62/201,542, filed on Aug. 5, 2015.
(60) Provisional application No. 62/205,733, filed on Aug. 16, 2015.
(60) Provisional application No. 62/232,067, filed on Sep. 24, 2015.

(51) Int. Cl. C12N 15/11; C12N 15/82; C12N 15/85

(52) U.S. Cl. CPC C12N 15/11; C12N 15/85; C12N 15/8201

(57) ABSTRACT

The invention provides for systems, methods, and compositions for targeting nucleic acids. In particular, the invention provides non-naturally occurring or engineered DNA or RNA-targeting systems comprising a novel DNA or RNA-targeting CRISPR effector protein and at least one targeting nucleic acid component like a guide RNA.

### RELATED APPLICATIONS AND INCORPORATION BY REFERENCE

[0001] This application claims benefit of and priority to U.S. Provisional 62/181,739, filed on Jun. 18, 2015; U.S. Provisional 62/193,507, filed on Jul. 16, 2015, U.S. Provisional 62/201,542, filed Aug. 5, 2015, U.S. Provisional 62/205,733, filed Aug. 16, 2015 and U.S. Provisional 62/232,067, filed Sep. 24, 2015.

### STATEMENT AS TO FEDERALLY SPONSORED RESEARCH

[0002] This invention was made with government support under Grant No. MH100706, awarded by the National Institutes of Health. The government has certain rights in the invention.

[0003] The foregoing applications, and all documents cited therein or during their prosecution (“appln cited documents”) and all documents cited or referenced in herein cited documents, together with any manufacturer's instructions, descriptions, product specifications, and product sheets for any products mentioned herein or in any document incorporated by reference herein, are hereby incorporated herein by reference, and may be employed in the practice of the invention. More specifically, all referenced documents are incorporated by reference to the same extent as if each individual document was specifically and individually indicated to be incorporated by reference.

### SEQUENCE LISTING

[0004] The instant application contains a Sequence Listing which has been submitted electronically in ASCII format and is hereby incorporated by reference in its entirety. Said ASCII copy, created on Dec. 17, 2015, is named 47627.05.2123_SL.txt and is 2,467,205 bytes in size.

### FIELD OF THE INVENTION

[0005] The present invention generally relates to systems, methods and compositions used for the control of gene expression involving sequence targeting, such as perturbation of gene transcripts or nucleic acid editing, that may use vector systems related to Clustered Regularly Interspaced Short Palindromic Repeats (CRISPR) and components thereof.

### BACKGROUND OF THE INVENTION

[0006] Recent advances in genome sequencing techniques and analysis methods have significantly accelerated the ability to catalog and map genetic factors associated with a diverse range of biological functions and diseases. Precise genome targeting technologies are needed to enable systematic reverse engineering of causal genetic variations by allowing selective perturbation of individual genetic elements, as well as to advance synthetic biology, biotechnological, and medical applications. Although genome-editing techniques such as designer zinc fingers, transcription activator-like effectors (TALEs), or homing meganucleases are available for producing targeted genome perturbations, there remains a need for new genome engineering technologies that employ novel strategies and molecular mechanisms and are affordable, easy to set up, scalable, and amenable to targeting multiple positions within the eukaryotic genome. This would provide a major resource for new applications in genome engineering and biotechnology.

[0007] The CRISPR-Cas systems of bacterial and archaeal adaptive immunity show extreme diversity of protein composition and genomic loci architecture. The CRISPR-Cas system loci has more than 50 gene families and there is no strictly universal genes indicating fast evolution and extreme diversity of loci architecture. So far, adopting a multi-pronged approach, there is comprehensive cas gene identification of about 395 profiles for 93 Cas proteins. Classification includes signature gene profiles plus signatures of locus architecture. A new classification of CRISPR-Cas systems is proposed in which these systems are broadly divided into two classes, Class 1 with multisubunit effector complexes and Class 2 with single-subunit effector modules exemplified by the Cas9 protein. Novel effector proteins associated with Class 2 CRISPR-Cas systems may be developed as powerful genome engineering tools and the prediction of putative novel effector proteins and their engineering and optimization is important.

[0008] Citation or identification of any document in this application is not an admission that such document is available as prior art to the present invention.

### SUMMARY OF THE INVENTION

[0009] There exists a pressing need for alternative and robust systems and techniques for targeting nucleic acids or polynucleotides (e.g. DNA or RNA or any hybrid or derivative thereof) with a wide array of applications. This invention addresses this need and provides related advantages. Adding the novel DNA or RNA-targeting systems of the present application to the repertoire of genomic and epigenomic targeting technologies may transform the study and perturbation or editing of specific target sites through direct detection, analysis and manipulation. To utilize the DNA or RNA-targeting systems of the present application effectively for genomic or epigenomic targeting without deleterious effects, it is critical to understand aspects of engineering and optimization of these DNA or RNA targeting tools.

[0010] The invention provides a method of modifying sequences associated with or at a target locus of interest, the method comprising delivering to said locus a non-naturally occurring or engineered composition comprising a putative Type V CRISPR-Cas loci effector protein and one or more nucleic acid components, wherein the effector protein forms a complex with the one or more nucleic acid components and upon binding of the said complex to the locus of interest the effector protein induces the modification of the sequences associated with or at the target locus of interest. In a preferred embodiment, the modification is the introduction of a strand break. In a preferred embodiment, the sequences associated with or at the target locus of interest comprises DNA and the effector protein is encoded by a subtype V-A CRISPR-Cas loci or a subtype V-B CRISPR-Cas loci.

[0011] It will be appreciated that the terms Cas enzyme, CRISPR enzyme, CRISPR protein Cas protein and CRISPR Cas are generally used interchangeably and at all points of reference herein refer by analogy to novel CRISPR effector proteins further described in this application, unless otherwise apparent, such as by specific reference to Cas9. The CRISPR effector proteins described herein are preferably Cpf1 effector proteins.

[0012] The invention provides a method of modifying sequences associated with or at a target locus of interest, the method comprising delivering to said sequences associated with or at the locus a non-naturally occurring or engineered composition comprising a Cpf1 loci effector protein and one or more nucleic acid components, wherein the Cpf1 effector protein forms a complex with the one or more nucleic acid components and upon binding of the said complex to the locus of interest the effector protein induces the modification of the sequences associated with or at the target locus of interest. In a preferred embodiment, the modification is the introduction of a strand break. In a preferred embodiment the Cpf1 effector protein forms a complex with one nucleic acid component; advantageously an engineered or non-naturally occurring nucleic acid component. The induction of modification of sequences associated with or at the target locus of interest can be Cpf1 effector protein-nucleic acid guided. In a preferred embodiment the one nucleic acid component is a CRISPR RNA (crRNA). In a preferred embodiment the one nucleic acid component is a mature crRNA or guide RNA, wherein the mature crRNA or guide RNA comprises a spacer sequence (or guide sequence) and a direct repeat sequence or derivatives thereof. In a preferred embodiment the spacer sequence or the derivative thereof comprises a seed sequence, wherein the seed sequence is critical for recognition and/or hybridization to the sequence at the target locus. In a preferred embodiment, the seed sequence of a FnCpf1 guide RNA is approximately within the first 5 nt on the 5′ end of the spacer sequence (or guide sequence). In a preferred embodiment the strand break is a staggered cut with a 5′ overhang. In a preferred embodiment, the sequences associated with or at the target locus of interest comprise linear or super coiled DNA.

[0013] Aspects of the invention relate to Cpf1 effector protein complexes having one or more non-naturally occurring or engineered or modified or optimized nucleic acid components. In a preferred embodiment the nucleic acid component of the complex may comprise a guide sequence linked to a direct repeat sequence, wherein the direct repeat sequence comprises one or more stem loops or optimized secondary structures. In a preferred embodiment, the direct repeat has a minimum length of 16 nts and a single stem loop. In further embodiments the direct repeat has a length longer than 16 nts, preferrably more than 17 nts, and has more than one stem loop or optimized secondary structures. In a preferred embodiment the direct repeat may be modified to comprise one or more protein-binding RNA aptamers. In a preferred embodiment, one or more aptamers may be included such as part of optimized secondary structure. Such aptamers may be capable of binding a bacteriophage coat protein. The bacteriophage coat protein may be selected from the group comprising Qβ, F2, GA, fr, JP501, MS2, M12, R17, BZ13, JP34, JP500, KU1, M11, MX1, TW18, VK, SP, FI, ID2, NL95, TW19, AP205, φCb5, φCb8r, φCb12r, φCb23r, 7s and PRR1. In a preferred embodiment the bacteriophage coat protein is MS2. The invention also provides for the nucleic acid component of the complex being 30 or more, 40 or more or 50 or more nucleotides in length.

[0014] The invention provides methods of genome editing wherein the method comprises two or more rounds of Cpf1 effector protein targeting and cleavage. In certain embodiments, a first round comprises the Cpf1 effector protein cleaving sequences associated with a target locus far away from the seed sequence and a second round comprises the Cpf1 effector protein cleaving sequences at the target locus. In preferred embodiments of the invention, a first round of targeting by a Cpf1 effector protein results in an indel and a second round of targeting by the Cpf1 effector protein may be repaired via homology directed repair (HDR). In a most preferred embodiment of the invention, one or more rounds of targeting by a Cpf1 effector protein results in staggered cleavage that may be repaired with insertion of a repair template.

[0015] The invention provides methods of genome editing or modifying sequences associated with or at a target locus of interest wherein the method comprises introducing a Cpf1 effector protein complex into any desired cell type, prokaryotic or eukaryotic cell, whereby the Cpf1 effector protein complex effectively functions to integrate a DNA insert into the genome of the eukaryotic or prokaryotic cell. In preferred embodiments, the cell is a eukaryotic cell and the genome is a mammalian genome. In preferred embodiments the integration of the DNA insert is facilitated by non-homologous end joining (NHEJ)-based gene insertion mechanisms. In preferred embodiments, the DNA insert is an exogenously introduced DNA template or repair template. In one preferred embodiment, the exogenously introduced DNA template or repair template is delivered with the Cpf1 effector protein complex or one component or a polynucleotide vector for expression of a component of the complex. In a more preferred embodiment the eukaryotic cell is a non-dividing cell (e.g. a non-dividing cell in which genome editing via HDR is especially challenging). In preferred methods of genome editing in human cells, the Cpf1 effector proteins may include but are not limited to FnCpf1, AsCpf1 and LbCpf1 effector proteins.

[0016] The invention also provides a method of modifying a target locus of interest, the method comprising delivering to said locus a non-naturally occurring or engineered composition comprising a C2c1 loci effector protein and one or more nucleic acid components, wherein the C2c1 effector protein forms a complex with the one or more nucleic acid components and upon binding of the said complex to the locus of interest the effector protein induces the modification of the target locus of interest. In a preferred embodiment, the modification is the introduction of a strand break.

[0017] In such methods the target locus of interest may be comprised in a DNA molecule in vitro. In a preferred embodiment the DNA molecule is a plasmid.

[0018] In such methods the target locus of interest may be comprised in a DNA molecule within a cell. The cell may be a prokaryotic cell or a eukaryotic cell. The cell may be a mammalian cell. The mammalian cell many be a non-human primate, bovine, porcine, rodent or mouse cell. The cell may be a non-mammalian eukaryotic cell such as poultry, fish or shrimp. The cell may also be a plant cell. The plant cell may be of a crop plant such as cassava, corn, sorghum, wheat, or rice. The plant cell may also be of an algae, tree or vegetable. The modification introduced to the cell by the present invention may be such that the cell and progeny of the cell are altered for improved production of biologic products such as an antibody, starch, alcohol or other desired cellular output. The modification introduced to the cell by the present invention may be such that the cell and progeny of the cell include an alteration that changes the biologic product produced.

[0019] The invention provides a method of modifying a target locus of interest, the method comprising delivering to said locus a non-naturally occurring or engineered composition comprising a Type VI CRISPR-Cas loci effector protein and one or more nucleic acid components, wherein the effector protein forms a complex with the one or more nucleic acid components and upon binding of the said complex to the locus of interest the effector protein induces the modification of the target locus of interest. In a preferred embodiment, the modification is the introduction of a strand break.

[0020] In a preferred embodiment, the target locus of interest comprises DNA.

[0021] In such methods the target locus of interest may be comprised in a DNA molecule within a cell. The cell may be a prokaryotic cell or a eukaryotic cell. The cell may be a mammalian cell. The mammalian cell many be a non-human mammal, e.g., primate, bovine, ovine, porcine, canine, rodent, Leporidae such as monkey, cow, sheep, pig, dog, rabbit, rat or mouse cell. The cell may be a non-mammalian eukaryotic cell such as poultry bird (e.g., chicken), vertebrate fish (e.g., salmon) or shellfish (e.g., oyster, claim, lobster, shrimp) cell. The cell may also be a plant cell. The plant cell may be of a monocot or dicot or of a crop or grain plant such as cassava, corn, sorghum, soybean, wheat, oat or rice. The plant cell may also be of an algae, tree or production plant, fruit or vegetable (e.g., trees such as citrus trees, e.g., orange, grapefruit or lemon trees; peach or nectarine trees; apple or pear trees; nut trees such as almond or walnut or pistachio trees; nightshade plants; plants of the genus Brassica; plants of the genus Lactuca; plants of the genus Spinacia; plants of the genus Capsicum; cotton, tobacco, asparagus, carrot, cabbage, broccoli, cauliflower, tomato, eggplant, pepper, lettuce, spinach, strawberry, blueberry, raspberry, blackberry, grape, coffee, cocoa, etc).

[0022] In any of the described methods the target locus of interest may be a genomic or epigenomic locus of interest. In any of the described methods the complex may be delivered with multiple guides for multiplexed use. In any of the described methods more than one protein(s) may be used.

[0023] In preferred embodiments of the invention, biochemical or in vitro or in vivo cleavage of sequences associated with or at a target locus of interest results without a putative transactivating crRNA (tracr RNA) sequence, e.g. cleavage by an FnCpf1 effector protein. In other embodiments of the invention, cleavage may result with a putative transactivating crRNA (tracr RNA) sequence, e.g. cleavage by other CRISPR family effector proteins, however after evaluation of the FnCpf1 locus, Applicants concluded that target DNA cleavage by a Cpf1 effector protein complex does not require a tracrRNA. Applicants determined that Cpf1 effector protein complexes comprising only a Cpf1 effector protein and a crRNA (guide RNA comprising a direct repeat sequence and a guide sequence) were sufficient to cleave target DNA.

[0024] In any of the described methods the effector protein (e.g., Cpf1) and nucleic acid components may be provided via one or more polynucleotide molecules encoding the protein and/or nucleic acid component(s), and wherein the one or more polynucleotide molecules are operably configured to express the protein and/or the nucleic acid component(s). The one or more polynucleotide molecules may comprise one or more regulatory elements operably configured to express the protein and/or the nucleic acid component(s). The one or more polynucleotide molecules may be comprised within one or more vectors. The invention comprehends such polynucleotide molecule(s), for instance such polynucleotide molecules operably configured to express the protein and/or the nucleic acid component(s), as well as such vector(s).

[0025] In any of the described methods the strand break may be a single strand break or a double strand break.

[0026] Regulatory elements may comprise inducible promotors. Polynucleotides and/or vector systems may comprise inducible systems.

[0027] In any of the described methods the one or more polynucleotide molecules may be comprised in a delivery system, or the one or more vectors may be comprised in a delivery system.

[0028] In any of the described methods the non-naturally occurring or engineered composition may be delivered via liposomes, particles (e.g. nanoparticles), exosomes, microvesicles, a gene-gun or one or more vectors, e.g., nucleic acid molecule or viral vectors.

[0029] The invention also provides a non-naturally occurring or engineered composition which is a composition having the characteristics as discussed herein or defined in any of the herein described methods.

[0030] The invention also provides a vector system comprising one or more vectors, the one or more vectors comprising one or more polynucleotide molecules encoding components of a non-naturally occurring or engineered composition which is a composition having the characteristics as discussed herein or defined in any of the herein described methods.

[0031] The invention also provides a delivery system comprising one or more vectors or one or more polynucleotide molecules, the one or more vectors or polynucleotide molecules comprising one or more polynucleotide molecules encoding components of a non-naturally occurring or engineered composition which is a composition having the characteristics as discussed herein or defined in any of the herein described methods.

[0032] The invention also provides a non-naturally occurring or engineered composition, or one or more polynucleotides encoding components of said composition, or vector or delivery systems comprising one or more polynucleotides encoding components of said composition for use in a therapeutic method of treatment. The therapeutic method of treatment may comprise gene or genome editing, or gene therapy.

[0033] The invention also encompasses computational methods and algorithms to predict new Class 2 CRISPR-Cas systems and identify the components therein.

[0034] The invention also provides for methods and compositions wherein one or more amino acid residues of the effector protein may be modified, e,g, an engineered or non-naturally-occurring effector protein or Cpf1. In an embodiment, the modification may comprise mutation of one or more amino acid residues of the effector protein. The one or more mutations may be in one or more catalytically active domains of the effector protein. The effector protein may have reduced or abolished nuclease activity compared with an effector protein lacking said one or more mutations. The effector protein may not direct cleavage of one or other DNA or RNA strand at the target locus of interest. The effector protein may not direct cleavage of either DNA or RNA strand at the target locus of interest. In a preferred embodiment, the one or more mutations may comprise two mutations. In a preferred embodiment the one or more amino acid residues are modified in a Cpf1 effector protein, e,g, an engineered or non-naturally-occurring effector protein or Cpf1. In a preferred embodiment the Cpf1 effector protein is a FnCpf1 effector protein. In a preferred embodiment, the one or more modified or mutated amino acid residues are D917A, E1006A or D1255A with reference to the amino acid position numbering of the FnCpf1 effector protein. In further preferred embodiments, the one or more mutated amino acid residues are D908A, E993A, D1263A with reference to the amino acid positions in AsCpf1 or LbD832A, E925A, D947A or D1180A with reference to the amino acid positions in LbCpf1.

[0035] The invention also provides for the one or more mutations or the two or more mutations to be in a catalytically active domain of the effector protein comprising a RuvC domain. In some embodiments of the invention the RuvC domain may comprise a RuvCI, RuvCII or RuvCIII domain, or a catalytically active domain which is homologous to a RuvCI, RuvCII or RuvCIII domain etc or to any relevant domain as described in any of the herein described methods. The effector protein may comprise one or more heterologous functional domains. The one or more heterologous functional domains may comprise one or more nuclear localization signal (NLS) domains. The one or more heterologous functional domains may comprise at least two or more NLS domains. The one or more NLS domain(s) may be positioned at or near or in proximity to a terminus of the effector protein (e.g., Cpf1) and if two or more NLSs, each of the two may be positioned at or near or in promixity to a terminus of the effector protein (e.g., Cpf1) The one or more heterologous functional domains may comprise one or more transcriptional activation domains. In a preferred embodiment the transcriptional activation domain may comprise VP64. The one or more heterologous functional domains may comprise one or more transcriptional repression domains. In a preferred embodiment the transcriptional repression domain comprises a KRAB domain or a SID domain (e.g. SID4X). The one or more heterologous functional domains may comprise one or more nuclease domains. In a preferred embodiment a nuclease domain comprises Fok1.

[0036] The invention also provides for the one or more heterologous functional domains to have one or more of the following activities: methylase activity, demethylase activity, transcription activation activity, transcription repression activity, transcription release factor activity, histone modification activity, nuclease activity, single-strand RNA cleavage activity, double-strand RNA cleavage activity, single-strand DNA cleavage activity, double-strand DNA cleavage activity and nucleic acid binding activity. At least one or more heterologous functional domains may be at or near the amino-terminus of the effector protein and/or wherein at least one or more heterologous functional domains is at or near the carboxy-terminus of the effector protein. The one or more heterologous functional domains may be fused to the effector protein. The one or more heterologous functional domains may be tethered to the effector protein. The one or more heterologous functional domains may be linked to the effector protein by a linker moiety.

[0037] The invention also provides for the effector protein (e.g., a Cpf1) comprising an effector protein (e.g., a Cpf1) from an organism from a genus comprising Streptococcus, Campylobacter, Nitratifractor, Staphylococcus, Parvibaculum, Roseburia, Neisseria, Gluconacetobacter, Azospirillum, Sphaerochaeta, Lactobacillus, Eubacterium, Corynebacter, Carnobacterium, Rhodobacter, Listeria, Paludibacter, Clostridium, Lachnospiraceae, Clostridiaridium, Leptotrichia, Francisella, Legionella, Alicyclobacillus, Methanomethyophilus, Porphyromonas, Prevotella, Bacteroidetes, Helcococcus, Letospira, Desulfovibrio, Desulfonatronum, Opitutaceae, Tuberibacillus, Bacillus, Brevibacilus, Methylobacterium or Acidaminococcus.

[0038] The invention also provides for the effector protein (e.g., a Cpf1) comprising an effector protein (e.g., a Cpf1) from an organism from S. mutans, S. agalactiae, S. equisimilis, S. sanguinis, S. pneumonia; C. jejuni, C. coli; N. salsuginis, N. tergarcus; S. auricularis, S. carnosus; N. meningitides, N. gonorrhoeae; L. monocytogenes, L. ivanovii; C. botulinum, C. difficile, C. tetani, C. sordellii.

[0039] The effector protein may comprise a chimeric effector protein comprising a first fragment from a first effector protein (e.g., a Cpf1) ortholog and a second fragment from a second effector (e.g., a Cpf1) protein ortholog, and wherein the first and second effector protein orthologs are different. At least one of the first and second effector protein (e.g., a Cpf1) orthologs may comprise an effector protein (e.g., a Cpf1) from an organism comprising Streptococcus, Campylobacter, Nitratifractor, Staphylococcus, Parvibaculum, Roseburia, Neisseria, Gluconacetobacter, Azospirillum, Sphaerochaeta, Lactobacillus, Eubacterium, Corynebacter, Carnobacterium, Rhodobacter, Listeria, Paludibacter, Clostridium, Lachnospiraceae, Clostridiaridium, Leptotrichia, Francisella, Legionella, Alicyclobacillus, Methanomethyophilus, Porphyromonas, Prevotella, Bacteroidetes, Helcococcus, Letospira, Desulfovibrio, Desulfonatronum, Opitutaceae, Tuberibacillus, Bacillus, Brevibacilus, Methylobacterium or Acidaminococcus; e.g., a chimeric effector protein comprising a first fragment and a second fragment wherein each of the first and second fragments is selected from a Cpf1 of an organism comprising Streptococcus, Campylobacter, Nitratifractor, Staphylococcus, Parvibaculum, Roseburia, Neisseria, Gluconacetobacter, Azospirillum, Sphaerochaeta, Lactobacillus, Eubacterium, Corynebacter, Carnobacterium, Rhodobacter, Listeria, Paludibacter, Clostridium, Lachnospiraceae, Clostridiaridium, Leptotrichia, Francisella, Legionella, Alicyclobacillus, Methanomethyophilus, Porphyromonas, Prevotella, Bacteroidetes, Helcococcus, Letospira, Desulfovibrio, Desulfonatronum, Opitutaceae, Tuberibacillus, Bacillus, Brevibacilus, Methylobacterium or Acidaminococcus wherein the first and second fragments are not from the same bacteria; for instance a chimeric effector protein comprising a first fragment and a second fragment wherein each of the first and second fragments is selected from a Cpf1 of S. mutans, S. agalactiae, S. equisimilis, S. sanguinis, S. pneumonia; C. jejuni, C. coli; N. salsuginis, N. tergarcus; S. auricularis, S. carnosus; N. meningitides, N. gonorrhoeae; L. monocytogenes, L. ivanovii; C. botulinum, C. difficile, C. tetani, C. sordellii; Francisella tularensis 1, Prevotella albensis, Lachnospiraceae bacterium MC2017 1, Butyrivibrio proteoclasticus, Peregrinibacteria bacterium GW2011_GWA2_33_10, Parcubacteria bacterium GW2011_GWC2_44_17, Smithella sp. SCADC, Acidaminococcus sp. BV3L6, Lachnospiraceae bacterium MA2020, Candidatus Methanoplasma termitum, Eubacterium eligens, Moraxella bovoculi 237, Leptospira inadai, Lachnospiraceae bacterium ND2006, Porphyromonas crevioricanis 3, Prevotella disiens and Porphyromonas macacae, wherein the first and second fragments are not from the same bacteria.

[0040] In preferred embodiments of the invention the effector protein is derived from a Cpf1 locus (herein such effector proteins are also referred to as “Cpf1p”), e.g., a Cpf1 protein (and such effector protein or Cpf1 protein or protein derived from a Cpf1 locus is also called “CRISPR enzyme”). Cpf1 loci include but are not limited to the Cpf1 loci of bacterial species listed in FIG. 64. In a more preferred embodiment, the Cpf1p is derived from a bacterial species selected from Francisella tularensis 1, Prevotella albensis, Lachnospiraceae bacterium MC2017 1, Butyrivibrio proteoclasticus, Peregrinibacteria bacterium GW2011_GWA2_33_10, Parcubacteria bacterium GW2011_GWC2_44_17, Smithella sp. SCADC, Acidaminococcus sp. BV3L6, Lachnospiraceae bacterium MA2020, Candidatus Methanoplasma termitum, Eubacterium eligens, Moraxella bovoculi 237, Leptospira inadai, Lachnospiraceae bacterium ND2006, Porphyromonas crevioricanis 3, Prevotella disiens and Porphyromonas macacae. In certain embodiments, the Cpf1p is derived from a bacterial species selected from Acidaminococcus sp. BV3L6, Lachnospiraceae bacterium MA2020. In certain embodiments, the effector protein is derived from a subspecies of Francisella tularensis 1, including but not limited to Francisella tularensis subsp. Novicida.

[0041] In further embodiments of the invention a protospacer adjacent motif (PAM) or PAM-like motif directs binding of the effector protein complex to the target locus of interest. In a preferred embodiment of the invention, the PAM is 5′ TTN, where N is A/C/G or T and the effector protein is FnCpf1p. In another preferred embodiment of the invention, the PAM is 5′ TTTV, where V is A/C or G and the effector protein is PaCpf1p. In certain embodiments, the PAM is 5′ TTN, where N is A/C/G or T, the effector protein is FnCpf1p, and the PAM is located upstream of the 5′ end of the protospacer. In certain embodiments of the invention, the PAM is 5′ CTA, where the effector protein is FnCpf1p, and the PAM is located upstream of the 5′ end of the protospacer or the target locus. In preferred embodiments, the invention provides for an expanded targeting range for RNA guided genome editing nucleases wherein the T-rich PAMs of the Cpf1 family allow for targeting and editing of AT-rich genomes.

[0042] In certain embodiments, the CRISPR enzyme is engineered and can comprise one or more mutations that reduce or eliminate a nuclease activity. The amino acid positions in the FnCpf1p RuvC domain include but are not limited to D917A, E1006A, E1028A, D1227A, D1255A, N1257A, D917A, E1006A, E1028A, D1227A, D1255A and N1257A. Applicants have also identified a putative second nuclease domain which is most similar to PD-(D/E)XK nuclease superfamily and HincII endonuclease like. The point mutations to be generated in this putative nuclease domain to substantially reduce nuclease activity include but are not limited to N580A, N584A, T587A, W609A, D610A, K613A, E614A, D616A, K624A, D625A, K627A and Y629A. In a preferred embodiment, the mutation in the FnCpf1p RuvC domain is D917A or E1006A, wherein the D917A or E1006A mutation completely inactivates the DNA cleavage activity of the FnCpf1 effector protein. In another embodiment, the mutation in the FnCpf1p RuvC domain is D1255A, wherein the mutated FnCpf1 effector protein has significantly reduced nucleolytic activity.

[0043] The amino acid positions in the AsCpf1p RuvC domain include but are not limited to 908, 993, and 1263. In a preferred embodiment, the mutation in the AsCpf1p RuvC domain is D908A, E993A, and D1263A, wherein the D908A, E993A, and D1263A mutations completely inactivates the DNA cleavage activity of the AsCpf1 effector protein. The amino acid positions in the LbCpf1p RuvC domain include but are not limited to 832, 947 or 1180. In a preferred embodiment, the mutation in the LbCpf1p RuvC domain is LbD832A, E925A, D947A or D1180A, wherein the LbD832A E925A, D947A or D1180A mutations completely inactivates the DNA cleavage activity of the LbCpf1 effector protein.

[0044] Mutations can also be made at neighboring residues, e.g., at amino acids near those indicated above that participate in the nuclease acrivity. In some embodiments, only the RuvC domain is inactivated, and in other embodiments, another putative nuclease domain is inactivated, wherein the effector protein complex functions as a nickase and cleaves only one DNA strand. In a preferred embodiment, the other putative nuclease domain is a HincII-like endonuclease domain. In some embodiments, two FnCpf1 variants (each a different nickase) are used to increase specificity, two nickase variants are used to cleave DNA at a target (where both nickases cleave a DNA strand, while minimizing or eliminating off-target modifications where only one DNA strand is cleaved and subsequently repaired). In preferred embodiments the Cpf1 effector protein cleaves sequences associated with or at a target locus of interest as a homodimer comprising two Cpf1 effector protein molecules. In a preferred embodiment the homodimer may comprise two Cpf1 effector protein molecules comprising a different mutation in their respective RuvC domains.

[0045] The invention contemplates methods of using two or more nickases, in particular a dual or double nickase approach. In some aspects and embodiments, a single type FnCpf1 nickase may be delivered, for example a modified FnCpf1 or a modified FnCpf1 nickase as described herein. This results in the target DNA being bound by two FnCpf1 nickases. In addition, it is also envisaged that different orthologs may be used, e.g, an FnCpf1 nickase on one strand (e.g., the coding strand) of the DNA and an ortholog on the non-coding or opposite DNA strand. The ortholog can be, but is not limited to, a Cas9 nickase such as a SaCas9 nickase or a SpCas9 nickase. It may be advantageous to use two different orthologs that require different PAMs and may also have different guide requirements, thus allowing a greater deal of control for the user. In certain embodiments, DNA cleavage will involve at least four types of nickases, wherein each type is guided to a different sequence of target DNA, wherein each pair introduces a first nick into one DNA strand and the second introduces a nick into the second DNA strand. In such methods, at least two pairs of single stranded breaks are introduced into the target DNA wherein upon introduction of first and second pairs of single-strand breaks, target sequences between the first and second pairs of single-strand breaks are excised. In certain embodiments, one or both of the orthologs is controllable, i.e. inducible.

[0046] In certain embodiments of the invention, the guide RNA or mature crRNA comprises, consists essentially of, or consists of a direct repeat sequence and a guide sequence or spacer sequence. In certain embodiments, the guide RNA or mature crRNA comprises, consists essentially of, or consists of a direct repeat sequence linked to a guide sequence or spacer sequence. In certain embodiments the guide RNA or mature crRNA comprises 19 nts of partial direct repeat followed by 20-30 nt of guide sequence or spacer sequence, advantageously about 20 nt, 23-25 nt or 24 nt. In certain embodiments, the effector protein is a FnCpf1 effector protein and requires at least 16 nt of guide sequence to achieve detectable DNA cleavage and a minimum of 17 nt of guide sequence to achieve efficient DNA cleavage in vitro. In certain embodiments, the direct repeat sequence is located upstream (i.e., 5′) from the guide sequence or spacer sequence. In a preferred embodiment the seed sequence (i.e. the sequence essential critical for recognition and/or hybridization to the sequence at the target locus) of the FnCpf1 guide RNA is approximately within the first 5 nt on the 5′ end of the guide sequence or spacer sequence.

[0047] In preferred embodiments of the invention, the mature crRNA comprises a stem loop or an optimized stem loop structure or an optimized secondary structure. In preferred embodiments the mature crRNA comprises a stem loop or an optimized stem loop structure in the direct repeat sequence, wherein the stem loop or optimized stem loop structure is important for cleavage activity. In certain embodiments, the mature crRNA preferably comprises a single stem loop. In certain embodiments, the direct repeat sequence preferably comprises a single stem loop. In certain embodiments, the cleavage activity of the effector protein complex is modified by introducing mutations that affect the stem loop RNA duplex structure. In preferred embodiments, mutations which maintain the RNA duplex of the stem loop may be introduced, whereby the cleavage activity of the effector protein complex is maintained. In other preferred embodiments, mutations which disrupt the RNA duplex structure of the stem loop may be introduced, whereby the cleavage activity of the effector protein complex is completely abolished.

[0048] The invention also provides for the nucleotide sequence encoding the effector protein being codon optimized for expression in a eukaryote or eukaryotic cell in any of the herein described methods or compositions. In an embodiment of the invention, the codon optimized effector protein is FnCpf1p and is codon optimized for operability in a eukaryotic cell or organism, e.g., such cell or organism as elsewhere herein mentioned, for instance, without limitation, a yeast cell, or a mammalian cell or organism, including a mouse cell, a rat cell, and a human cell or non-human eukaryote organism, e.g., plant.

[0049] In certain embodiments of the invention, at least one nuclear localization signal (NLS) is attached to the nucleic acid sequences encoding the Cpf1 effector proteins. In preferred embodiments at least one or more C-terminal or N-terminal NLSs are attached (and hence nucleic acid molecule(s) coding for the Cpf1 effector protein can include coding for NLS(s) so that the expressed product has the NLS(s) attached or connected). In a preferred embodiment a C-terminal NLS is attached for optimal expression and nuclear targeting in eukaryotic cells, preferably human cells. In a preferred embodiment, the codon optimized effector protein is FnCpf1p and the spacer length of the guide RNA is from 15 to 35 nt. In certain embodiments, the spacer length of the guide RNA is at least 16 nucleotides, such as at least 17 nucleotides. In certain embodiments, the spacer length is from 15 to 17 nt, from 17 to 20 nt, from 20 to 24 nt, eg. 20, 21, 22, 23, or 24 nt, from 23 to 25 nt, e.g., 23, 24, or 25 nt, from 24 to 27 nt, from 27-30 nt, from 30-35 nt, or 35 nt or longer. In certain embodiments of the invention, the codon optimized effector protein is FnCpf1p and the direct repeat length of the guide RNA is at least 16 nucleotides. In certain embodiments, the codon optimized effector protein is FnCpf1p and the direct repeat length of the guide RNA is from 16 to 20 nt, e.g., 16, 17, 18, 19, or 20 nucleotides. In certain preferred embodiments, the direct repeat length of the guide RNA is 19 nucleotides.

[0050] The invention also encompasses methods for delivering multiple nucleic acid components, wherein each nucleic acid component is specific for a different target locus of interest thereby modifying multiple target loci of interest. The nucleic acid component of the complex may comprise one or more protein-binding RNA aptamers. The one or more aptamers may be capable of binding a bacteriophage coat protein. The bacteriophage coat protein may be selected from the group comprising Qβ, F2, GA, fr, JP501, MS2, M12, R17, BZ13, JP34, JP500, KU1, M11, MX1, TW18, VK, SP, FI, ID2, NL95, TW19, AP205, φCb5, φCb8r, φCb12r, φCb23r, 7s and PRR1. In a preferred embodiment the bacteriophage coat protein is MS2. The invention also provides for the nucleic acid component of the complex being 30 or more, 40 or more or 50 or more nucleotides in length.

[0051] The invention also encompasses the cells, components and/or systems of the present invention having trace amounts of cations present in the cells, components and/or systems. Advantageously, the cation is magnesium, such as Mg²⁺. The cation may be present in a trace amount. A preferred range may be about 1 mM to about 15 mM for the cation, which is advantageously Mg²⁺. A preferred concentration may be about 1 mM for human based cells, components and/or systems and about 10 mM to about 15 mM for bacteria based cells, components and/or systems. See, e.g., Gasiunas et al., PNAS, published online Sep. 4, 2012, www.pnas.org/cgi/doi/10.1073/pnas.1208507109.

[0052] Accordingly, it is an object of the invention not to encompass within the invention any previously known product, process of making the product, or method of using the product such that Applicants reserve the right and hereby disclose a disclaimer of any previously known product, process, or method. It is further noted that the invention does not intend to encompass within the scope of the invention any product, process, or making of the product or method of using the product, which does not meet the written description and enablement requirements of the USPTO (35 U.S.C. §112, first paragraph) or the EPO (Article 83 of the EPC), such that Applicants reserve the right and hereby disclose a disclaimer of any previously described product, process of making the product, or method of using the product. It may be advantageous in the practice of the invention to be in compliance with Art. 53(c) EPC and Rule 28(b) and (c) EPC. Nothing herein is to be construed as a promise.

[0053] It is noted that in this disclosure and particularly in the claims and/or paragraphs, terms such as “comprises”, “comprised”, “comprising” and the like can have the meaning attributed to it in U.S. Patent law; e.g., they can mean “includes”, “included”, “including”, and the like; and that terms such as “consisting essentially of” and “consists essentially of” have the meaning ascribed to them in U.S. patent law.

[0054] These and other embodiments are disclosed or are obvious from and encompassed by, the following Detailed Description.

### BRIEF DESCRIPTION OF THE DRAWINGS

[0055] The novel features of the invention are set forth with particularity in the appended claims. A better understanding of the features and advantages of the present invention will be obtained by reference to the following detailed description that sets forth illustrative embodiments, in which the principles of the invention are utilized, and the accompanying drawings of which:

[0056] FIGS. 1A-1B depict a new classification of CRISPR-Cas systems. Class 2 includes multisubunit crRNA-effector complexes (Cascade) and Class 2 includes Single-subunit crRNA-effector complexes (Cas9-like).

[0057] FIG. 2 provides a molecular organization of CRISPR-Cas.

[0058] FIGS. 3A-3D provide structures of Type I and III effector complexes: common architecture/common ancestry despite extensive sequence divergence.

[0059] FIG. 4 shows CRISPR-Cas as a RNA recognition motif (RRM)-centered system.

[0060] FIGS. 5A-5D show Cas1 phylogeny where recombination of adaptation and crRNA-effector modules show a major aspect of CRISPR-Cas evolution.

[0061] FIG. 6 shows a CRISPR-Cas census, specifically a distribution of CRISPR-Cas types/subtypes among archaea and bacteria

[0062] FIG. 7 depicts a pipeline for identifying Cas candidates.

[0063] FIGS. 8A-8D depict an organization of complete loci of Class 2 systems.

[0064] FIGS. 9A-9B depict C2c1 neighborhoods.

[0065] FIGS. 10A-10C depict a Cas1 tree.

[0066] FIGS. 11A-11B depict a domain organization of class 2 families.

[0067] FIGS. 12A-12B depict TnpB homology regions in Class 2 proteins (SEQ ID NOS 246-428, respectively, in order of appearance).

[0068] FIGS. 13A-13B depict C2c2 neighborhoods.

[0069] FIGS. 14A-14E depict HEPN RxxxxH motif in C2c2 family (SEQ ID NOS 429-1032, respectively, in order of appearance).

[0070] FIG. 15 depicts C2C1: 1. Alicyclobacillus acidoterrestris ATCC 49025 (SEQ ID NOS 1034-1037, respectively, in order of appearance).

[0071] FIG. 16 depicts C2C1: 4. Desulfonatronum thiodismutans strain MLF-1 (SEQ ID NOS 1038-1041, respectively, in order of appearance).

[0072] FIG. 17 depicts C2C1: 5. Opitutaceae bacterium TAV5 (SEQ ID NOS 1042-1045, respectively, in order of appearance).

[0073] FIG. 18 depicts C2C1: 7. Bacillus thermoamylovorans strain B4166 (SEQ ID NOS 1046-1049, respectively, in order of appearance).

[0074] FIG. 19 depicts C2C1: 9. Bacillus sp. NSP2.1 (SEQ ID NOS 1050-1053, respectively, in order of appearance).

[0075] FIG. 20 depicts C2C2: 1. Lachnospiraceae bacterium MA2020 (SEQ ID NOS 1054-1057, respectively, in order of appearance).

[0076] FIG. 21 depicts C2C2: 2. Lachnospiraceae bacterium NK4A179 (SEQ ID NOS 1058-1064, respectively, in order of appearance).

[0077] FIG. 22 depicts C2C2: 3. [Clostridium] aminophilum DSM 10710 (SEQ ID NOS 1065-1068, respectively, in order of appearance).

[0078] FIG. 23 depicts C2C2: 4. Lachnospiraceae bacterium NK4A144 (SEQ ID NOS 1069 and 1070, respectively, in order of appearance).

[0079] FIG. 24 depicts C2C2: 5. Carnobacterium gallinarum DSM 4847 (SEQ ID NOS 1071-1074, respectively, in order of appearance).

[0080] FIG. 25 depicts C2C2: 6. Carnobacterium gallinarum DSM 4847 (SEQ ID NOS 1075-1081, respectively, in order of appearance).

[0081] FIG. 26 depicts C2C2: 7. Paludibacter propionicigenes WB4 (SEQ ID NO: 1082).

[0082] FIG. 27 depicts C2C2: 8. Listeria seeligeri serovar 1/2b (SEQ ID NOS 1083-1086, respectively, in order of appearance).

[0083] FIG. 28 depicts C2C2: 9. Listeria weihenstephanensis FSL R9-0317 (SEQ ID NO: 1087).

[0084] FIG. 29 depicts C2C2: 10. Listeria bacterium FSL M6-0635 (SEQ ID NOS 1088 and 1091, respectively, in order of appearance).

[0085] FIG. 30 depicts C2C2: 11. Leptotrichia wadei F0279 (SEQ ID NO: 1092).

[0086] FIG. 31 depicts C2C2: 12. Leptotrichia wadei F0279 (SEQ ID NOS 1093-1099, respectively, in order of appearance).

[0087] FIG. 32 depicts C2C2: 14. Leptotrichia shahii DSM 19757 (SEQ ID NOS 1100-1103, respectively, in order of appearance).

[0088] FIG. 33 depicts C2C2: 15. Rhodobacter capsulatus SB 1003 (SEQ ID NOS 1104 and 1105, respectively, in order of appearance).

[0089] FIG. 34 depicts C2C2: 16. Rhodobacter capsulatus R121 (SEQ ID NOS 1106 and 1107, respectively, in order of appearance).

[0090] FIG. 35 depicts C2C2: 17. Rhodobacter capsulatus DE442 (SEQ ID NOS 1108 and 1109, respectively, in order of appearance).

[0091] FIG. 36 depicts a tree of DRs

[0092] FIG. 37 depicts a tree of C2C2s

[0093] FIGS. 38A-38BB show the sequence alignment of Cas-Cpf1 orthologs (SEQ ID NOS 1033 and 1110-1166, respectively, in order of appearance).

[0094] FIGS. 39A-39B show the overview of Cpf1 loci alignment

[0095] FIGS. 40A-40X shows the PACYC184 FnCpf1 (PY001) vector construct (SEQ ID NO: 1167 and SEQ ID NOS 1168-1189, respectively, in order of appearance).

[0096] FIGS. 41A-41I shows the sequence of humanized PaCpf1, with the nucleotide sequence as SEQ ID NO: 1190 and the protein sequence as SEQ ID NO: 1191.

[0097] FIG. 42 depicts a PAM challenge assay

[0098] FIG. 43 depicts a schematic of an endogenous FnCpf1 locus. pY0001 is a pACY184 backbone (from NEB) with a partial FnCpf1 locus. The FnCpf1 locus was PCR amplified in three pieces and cloned into Xba1 and Hind3 cut pACYC184 using Gibson assembly. PY0001 contains the endogenous FnCpf1 locus from 255 bp of the acetyltransferase 3′ sequence to the fourth spacer sequence. Only spacer 1-3 are potentially active since space 4 is no longer flanked by direct repeats.

[0099] FIG. 44 depicts PAM libraries, which discloses SEQ ID NOS 1192-1195, respectively, in order of appearance. Both PAM libraries (left and right) are in pUC19. The complexity of left PAM library is 48˜65 k and the complexity of the right PAM library is 47˜16 k. Both libraries were prepared with a representation of >500.

[0100] FIG. 45A-4E depicts FnCpf1 PAM Screen Computational Analysis. After sequencing of the screen DNA, the regions corresponding to either the left PAM or the right PAM were extracted. For each sample, the number of PAMs present in the sequenced library were compared to the number of expected PAMs in the library (4̂8 for the left library, 4̂7 for the right). FIG. 44A depicts the left library showed PAM depletion. To quantify this depletion, an enrichment ratio was calculated. For both conditions (control pACYC or FnCpf1 containing pACYC) the ratio was calculated for each PAM in the library as

$$ratio = - {log}_{2} \frac{sample + 0.01}{initial library + 0.01} .$$

Plotting the distribution shows little enrichment in the control sample and enrichment in both bioreps. FIGS. 44B-44D depict PAM ratio distributions. FIG. 44E shows PAMs above a ratio of 8 were collected, and the frequency distributions were plotted, revealing a 5′ YYN PAM.

[0101] FIG. 46 depicts RNAseq analysis of the Francisella tolerances Cpf1 locus, which shows that the CRISPR locus is actively expressed. In addition to the Cpf1 and Cas genes, two small non-coding transcript are highly transcribed, which might be the putative tracrRNAs. The CRISPR array is also expressed. Both the putative tracrRNAs and CRISPR array are transcribed in the same direction as the Cpf1 and Cas genes. Here all RNA transcripts identified through the RNAseq experiment are mapped against the locus. After further evaluation of the FnCpf1 locus, Applicants concluded that target DNA cleavage by a Cpf1 effector protein complex does not require a tracrRNA. Applicants determined that Cpf1 effector protein complexes comprising only a Cpf1 effector protein and a crRNA (guide RNA comprising a direct repeat sequence and a guide sequence) were sufficient to cleave target DNA.

[0102] FIG. 47 depicts zooming into the Cpf1 CRISPR array. Many different short transcripts can be identified. In this plot, all identified RNA transcripts are mapped against the Cpf1 locus.

[0103] FIG. 48 depicts identifying two putative tracrRNAs after selecting transcripts that are less than 85 nucleotides long

[0104] FIG. 49 depicts zooming into putative tracrRNA 1 (SEQ ID NO: 1196) and the CRISPR array

[0105] FIG. 50 depicts zooming into putative tracrRNA 2 which discloses SEQ ID NOS 1197-1203, respectively, in order of appearance.

[0106] FIG. 51 depicts putative crRNA sequences (repeat in blue, spacer in black) (SEQ ID NOS 1205 and 1206, respectively, in order of appearance).

[0107] FIG. 52 shows a schematic of the assay to confirm the predicted FnCpf1 PAM in vivo.

[0108] FIG. 53 shows FnCpf1 locus carrying cells and control cells transformed with pUC19 encoding endogenous spacer 1 with 5′ TTN PAM.

[0109] FIG. 54 shows a schematic indicating putative tracrRNA sequence positions in the FnCpf1 locus, the crRNA (SEQ ID NO: 1207) and the pUC protospacer vector.

[0110] FIG. 55 is a gel showing the PCR fragment with TTa PAM and proto-spacer1 sequence incubated in cell lysate.

[0111] FIG. 56 is a gel showing the pUC-spacer1 with different PAMs incubated in cell lysate.

[0112] FIG. 57 is a gel showing the BasI digestion after incubation in cell lysate.

[0113] FIG. 58 is a gel showing digestion results for three putative crRNA sequences (SEQ ID NO: 1208).

[0114] FIG. 59 is a gel showing testing of different lengths of spacer against a piece of target DNA containing the target site: 5′-TTAgagaagtcatttaataaggccactgttaaaa-3′ (SEQ ID NO: 1209). The results show that crRNAs 1-7 mediated successful cleavage of the target DNA in vitro with FnCpf1. crRNAs 8-13 did not facilitate cleavage of the target DNA. SEQ ID NOS 1210-1248 are disclosed, respectively, in order of appearance.

[0115] FIG. 60 is a schematic indicating the minimal FnCpf1 locus.

[0116] FIG. 61 is a schematic indicating the minimal Cpf1 guide (SEQ ID NO: 1249).

[0117] FIG. 62A-62E depicts PaCpf1 PAM Screen Computational Analysis. After sequencing of the screen DNA, the regions corresponding to either the left PAM or the right PAM were extracted. For each sample, the number of PAMs present in the sequenced library were compared to the number of expected PAMs in the library (4̂7). (FIG. 62A) The left library showed very slight PAM depletion. To quantify this depletion, an enrichment ratio was calculated. For both conditions (control pACYC or PaCpf1 containing pACYC) the ratio was calculated for each PAM in the library as

$$ratio = - {log}_{2} \frac{sample + 0.01}{initial library + 0.01}$$

Plotting the distribution shows little enrichment in the control sample and enrichment in both bioreps. FIGS. 62B-62D depict PAM ratio distributions. FIG. 62E shows all PAMs above a ratio of 4.5 were collected, and the frequency distributions were plotted, revealing a 5′ TTTV PAM, where V is A or C or G.

[0118] FIG. 63 shows a vector map of the human codon optimized PaCpf1 sequence depicted as CBh-NLS-huPaCpf1-NLS-3×HA-pA.

[0119] FIGS. 64A-64B show a phylogenetic tree of 51 Cpf1 loci in different bacteria. Highlighted boxes indicate Gene Reference #s: 1-17. Boxed/numbered orthologs were tested for in vitro cleavage activity with predicted mature crRNA; orthologs with boxes around their numbers showed activity in the in vitro assay.

[0120] FIGS. 65A-65H show the details of the human codon optimized sequence for Lachnospiraceae bacterium MC2017 1 Cpf1 having a gene length of 3849 nts (Ref #3 in FIG. 64). FIG. 65A: Codon Adaptation Index (CAI). The distribution of codon usage frequency along the length of the gene sequence. A CAI of 1.0 is considered to be perfect in the desired expression organism, and a CAI of >0.8 is regarded as good, in terms of high gene expression level. FIG. 65B: Frequency of Optimal Codons (FOP). The percentage distribution of codons in computed codon quality groups. The value of 100 is set for the codon with the highest usage frequency for a given amino acid in the desired expression organism. FIG. 65C: GC Content Adjustment. The ideal percentage range of GC content is between 30-70%. Peaks of % GC content in a 60 bp window have been removed. FIG. 65D: Restriction Enzymes and CIS-Acting Elements. FIG. 65E: Remove Repeat Sequences. FIG. 65F-G: Optimized Sequence (Optimized Sequence Length: 3849, GC % 54.70) (SEQ ID NO: 1250). FIG. 65H: Protein Sequence (SEQ ID NO: 1251).

[0121] FIGS. 66A-66H show the details of the human codon optimized sequence for Butyrivibrio proteoclasticus Cpf1 having a gene length of 3873 nts (Ref #4 in FIG. 64). FIG. 66A: Codon Adaptation Index (CAI). The distribution of codon usage frequency along the length of the gene sequence. A CAI of 1.0 is considered to be perfect in the desired expression organism, and a CAI of >0.8 is regarded as good, in terms of high gene expression level. FIG. 66B: Frequency of Optimal Codons (FOP). The percentage distribution of codons in computed codon quality groups. The value of 100 is set for the codon with the highest usage frequency for a given amino acid in the desired expression organism. FIG. 66C: GC Content Adjustment. The ideal percentage range of GC content is between 30-70%. Peaks of % GC content in a 60 bp window have been removed. FIG. 66D: Restriction Enzymes and CIS-Acting Elements. FIG. 66E: Remove Repeat Sequences. FIG. 66F-G: Optimized Sequence (Optimized Sequence Length: 3873, GC % 54.05) (SEQ ID NO: 1252). FIG. 66H: Protein Sequence (SEQ ID NO: 1253).

[0122] FIGS. 67A-67H show the details of the human codon optimized sequence for Peregrinibacteria bacterium GW2011_GWA2_33_10 Cpf1 having a gene length of 4581 nts (Ref #5 in FIG. 64). FIG. 67A: Codon Adaptation Index (CAI). The distribution of codon usage frequency along the length of the gene sequence. A CAI of 1.0 is considered to be perfect in the desired expression organism, and a CAI of >0.8 is regarded as good, in terms of high gene expression level. FIG. 67B: Frequency of Optimal Codons (FOP). The percentage distribution of codons in computed codon quality groups. The value of 100 is set for the codon with the highest usage frequency for a given amino acid in the desired expression organism. FIG. 67C: GC Content Adjustment. The ideal percentage range of GC content is between 30-70%. Peaks of % GC content in a 60 bp window have been removed. FIG. 67D: Restriction Enzymes and CIS-Acting Elements. FIG. 67E: Remove Repeat Sequences. FIG. 67F-G: Optimized Sequence (Optimized Sequence Length: 4581, GC % 50.81) (SEQ ID NO: 1254). FIG. 67H: Protein Sequence (SEQ ID NO: 1255).

[0123] FIGS. 68A-68H show the details of the human codon optimized sequence for Parcubacteria bacterium GW2011_GWC2_44_17 Cpf1 having a gene length of 4206 nts (Ref #6 in FIG. 64). FIG. 68A: Codon Adaptation Index (CAI). The distribution of codon usage frequency along the length of the gene sequence. A CAI of 1.0 is considered to be perfect in the desired expression organism, and a CAI of >0.8 is regarded as good, in terms of high gene expression level. FIG. 68B: Frequency of Optimal Codons (FOP). The percentage distribution of codons in computed codon quality groups. The value of 100 is set for the codon with the highest usage frequency for a given amino acid in the desired expression organism. FIG. 68C: GC Content Adjustment. The ideal percentage range of GC content is between 30-70%. Peaks of % GC content in a 60 bp window have been removed. FIG. 68D: Restriction Enzymes and CIS-Acting Elements. FIG. 68E: Remove Repeat Sequences. FIG. 68F-G: Optimized Sequence (Optimized Sequence Length: 4206, GC % 52.17) (SEQ ID NO: 1256). FIG. 68H: Protein Sequence (SEQ ID NO: 1257).

[0124] FIGS. 69A-69H show the details of the human codon optimized sequence for Smithella sp. SCADC Cpf1 having a gene length of 3900 nts (Ref #7 in FIG. 64). FIG. 69A: Codon Adaptation Index (CAI). The distribution of codon usage frequency along the length of the gene sequence. A CAI of 1.0 is considered to be perfect in the desired expression organism, and a CAI of >0.8 is regarded as good, in terms of high gene expression level. FIG. 69B: Frequency of Optimal Codons (FOP). The percentage distribution of codons in computed codon quality groups. The value of 100 is set for the codon with the highest usage frequency for a given amino acid in the desired expression organism. FIG. 69C: GC Content Adjustment. The ideal percentage range of GC content is between 30-70%. Peaks of % GC content in a 60 bp window have been removed. FIG. 69D: Restriction Enzymes and CIS-Acting Elements. FIG. 69E: Remove Repeat Sequences. FIG. 69F-G: Optimized Sequence (Optimized Sequence Length: 3900, GC % 51.56) (SEQ ID NO: 1258). FIG. 69H: Protein Sequence (SEQ ID NO: 1259).

[0125] FIGS. 70A-70H show the details of the human codon optimized sequence for Acidaminococcus sp. BV3L6 Cpf1 having a gene length of 4071 nts (Ref #8 in FIG. 64). FIG. 70A: Codon Adaptation Index (CAI). The distribution of codon usage frequency along the length of the gene sequence. A CAI of 1.0 is considered to be perfect in the desired expression organism, and a CAI of >0.8 is regarded as good, in terms of high gene expression level. FIG. 70B: Frequency of Optimal Codons (FOP). The percentage distribution of codons in computed codon quality groups. The value of 100 is set for the codon with the highest usage frequency for a given amino acid in the desired expression organism. FIG. 70C: GC Content Adjustment. The ideal percentage range of GC content is between 30-70%. Peaks of % GC content in a 60 bp window have been removed. FIG. 70D: Restriction Enzymes and CIS-Acting Elements. FIG. 70E: Remove Repeat Sequences. FIG. 70E-G: Optimized Sequence (Optimized Sequence Length: 4071, GC % 54.89) (SEQ ID NO: 1260). FIG. 70H: Protein Sequence (SEQ ID NO: 1261).

[0126] FIGS. 71A-71H show the details of the human codon optimized sequence for Lachnospiraceae bacterium MA2020 Cpf1 having a gene length of 3768 nts (Ref #9 in FIG. 64). FIG. 71A: Codon Adaptation Index (CAI). The distribution of codon usage frequency along the length of the gene sequence. A CAI of 1.0 is considered to be perfect in the desired expression organism, and a CAI of >0.8 is regarded as good, in terms of high gene expression level. FIG. 71B: Frequency of Optimal Codons (FOP). The percentage distribution of codons in computed codon quality groups. The value of 100 is set for the codon with the highest usage frequency for a given amino acid in the desired expression organism. FIG. 71C: GC Content Adjustment. The ideal percentage range of GC content is between 30-70%. Peaks of % GC content in a 60 bp window have been removed. FIG. 71D: Restriction Enzymes and CIS-Acting Elements. FIG. 71E: Remove Repeat Sequences. FIG. 71F-G: Optimized Sequence (Optimized Sequence Length: 3768, GC % 51.53) (SEQ ID NO: 1262). FIG. 71H: Protein Sequence (SEQ ID NO: 1263).

[0127] FIGS. 72A-72H show the details of the human codon optimized sequence for Candidatus Methanoplasma termitum Cpf1 having a gene length of 3864 nts (Ref #10 in FIG. 64). FIG. 72A: Codon Adaptation Index (CAI). The distribution of codon usage frequency along the length of the gene sequence. A CAI of 1.0 is considered to be perfect in the desired expression organism, and a CAI of >0.8 is regarded as good, in terms of high gene expression level. FIG. 72B: Frequency of Optimal Codons (FOP). The percentage distribution of codons in computed codon quality groups. The value of 100 is set for the codon with the highest usage frequency for a given amino acid in the desired expression organism. FIG. 72C: GC Content Adjustment. The ideal percentage range of GC content is between 30-70%. Peaks of % GC content in a 60 bp window have been removed. FIG. 72D: Restriction Enzymes and CIS-Acting Elements. FIG. 72E: Remove Repeat Sequences. FIG. 72F-G: Optimized Sequence (Optimized Sequence Length: 3864, GC % 52.67) (SEQ ID NO: 1264). FIG. 72H: Protein Sequence (SEQ ID NO: 1265).

[0128] FIGS. 73A-73H show the details of the human codon optimized sequence for Eubacterium eligens Cpf1 having a gene length of 3996 nts (Ref #11 in FIG. 64). FIG. 73A: Codon Adaptation Index (CAI). The distribution of codon usage frequency along the length of the gene sequence. A CAI of 1.0 is considered to be perfect in the desired expression organism, and a CAI of >0.8 is regarded as good, in terms of high gene expression level. FIG. 73B: Frequency of Optimal Codons (FOP). The percentage distribution of codons in computed codon quality groups. The value of 100 is set for the codon with the highest usage frequency for a given amino acid in the desired expression organism. FIG. 73C: GC Content Adjustment. The ideal percentage range of GC content is between 30-70%. Peaks of % GC content in a 60 bp window have been removed. FIG. 73D: Restriction Enzymes and CIS-Acting Elements. FIG. 73E: Remove Repeat Sequences. FIG. 73F-G: Optimized Sequence (Optimized Sequence Length: 3996, GC % 50.52) (SEQ ID NO: 1266). FIG. 73H: Protein Sequence (SEQ ID NO: 1267).

[0129] FIGS. 74A-74H show the details of the human codon optimized sequence for Moraxella bovoculi 237 Cpf1 having a gene length of 4269 nts (Ref #12 in FIG. 64). FIG. 74A: Codon Adaptation Index (CAI). The distribution of codon usage frequency along the length of the gene sequence. A CAI of 1.0 is considered to be perfect in the desired expression organism, and a CAI of >0.8 is regarded as good, in terms of high gene expression level. FIG. 74B: Frequency of Optimal Codons (FOP). The percentage distribution of codons in computed codon quality groups. The value of 100 is set for the codon with the highest usage frequency for a given amino acid in the desired expression organism. FIG. 74C: GC Content Adjustment. The ideal percentage range of GC content is between 30-70%. Peaks of % GC content in a 60 bp window have been removed. FIG. 74D: Restriction Enzymes and CIS-Acting Elements. FIG. 74E: Remove Repeat Sequences. FIG. 74F-G: Optimized Sequence (Optimized Sequence Length: 4269, GC % 53.58) (SEQ ID NO: 1268). FIG. 74H: Protein Sequence (SEQ ID NO: 1269).

[0130] FIGS. 75A-75H show the details of the human codon optimized sequence for Leptospira inadai Cpf1 having a gene length of 3939 nts (Ref #13 in FIG. 64). FIG. 75A: Codon Adaptation Index (CAI). The distribution of codon usage frequency along the length of the gene sequence. A CAI of 1.0 is considered to be perfect in the desired expression organism, and a CAI of >0.8 is regarded as good, in terms of high gene expression level. FIG. 75B: Frequency of Optimal Codons (FOP). The percentage distribution of codons in computed codon quality groups. The value of 100 is set for the codon with the highest usage frequency for a given amino acid in the desired expression organism. FIG. 75C: GC Content Adjustment. The ideal percentage range of GC content is between 30-70%. Peaks of % GC content in a 60 bp window have been removed. FIG. 75D: Restriction Enzymes and CIS-Acting Elements. FIG. 75E: Remove Repeat Sequences. FIG. 75F-G: Optimized Sequence (Optimized Sequence Length: 3939, GC % 51.30) (SEQ ID NO: 1270). FIG. 75H: Protein Sequence (SEQ ID NO: 1271).

[0131] FIGS. 76A-76H show the details of the human codon optimized sequence for Lachnospiraceae bacterium ND2006 Cpf1 having a gene length of 3834 nts (Ref #14 in FIG. 64). FIG. 76A: Codon Adaptation Index (CAI). The distribution of codon usage frequency along the length of the gene sequence. A CAI of 1.0 is considered to be perfect in the desired expression organism, and a CAI of >0.8 is regarded as good, in terms of high gene expression level. FIG. 76B: Frequency of Optimal Codons (FOP). The percentage distribution of codons in computed codon quality groups. The value of 100 is set for the codon with the highest usage frequency for a given amino acid in the desired expression organism. FIG. 76C: GC Content Adjustment. The ideal percentage range of GC content is between 30-70%. Peaks of % GC content in a 60 bp window have been removed. FIG. 76D: Restriction Enzymes and CIS-Acting Elements. FIG. 76E: Remove Repeat Sequences. FIG. 76F-G: Optimized Sequence (Optimized Sequence Length: 3834, GC % 51.06) (SEQ ID NO: 1272). FIG. 76H: Protein Sequence (SEQ ID NO: 1273).

[0132] FIGS. 77A-77H show the details of the human codon optimized sequence for Porphyromonas crevioricanis 3 Cpf1 having a gene length of 3930 nts (Ref #15 in FIG. 64). FIG. 77A: Codon Adaptation Index (CAI). The distribution of codon usage frequency along the length of the gene sequence. A CAI of 1.0 is considered to be perfect in the desired expression organism, and a CAI of >0.8 is regarded as good, in terms of high gene expression level. FIG. 77B: Frequency of Optimal Codons (FOP). The percentage distribution of codons in computed codon quality groups. The value of 100 is set for the codon with the highest usage frequency for a given amino acid in the desired expression organism. FIG. 77C: GC Content Adjustment. The ideal percentage range of GC content is between 30-70%. Peaks of % GC content in a 60 bp window have been removed. FIG. 77D: Restriction Enzymes and CIS-Acting Elements. FIG. 77E: Remove Repeat Sequences. FIG. 77F-G: Optimized Sequence (Optimized Sequence Length: 3930, GC % 54.42) (SEQ ID NO: 1274). FIG. 77H: Protein Sequence (SEQ ID NO: 1275).

[0133] FIGS. 78A-78H show the details of the human codon optimized sequence for Prevotella disiens Cpf1 having a gene length of 4119 nts (Ref #16 in FIG. 64). FIG. 78A: Codon Adaptation Index (CAI). The distribution of codon usage frequency along the length of the gene sequence. A CAI of 1.0 is considered to be perfect in the desired expression organism, and a CAI of >0.8 is regarded as good, in terms of high gene expression level. FIG. 78B: Frequency of Optimal Codons (FOP). The percentage distribution of codons in computed codon quality groups. The value of 100 is set for the codon with the highest usage frequency for a given amino acid in the desired expression organism. FIG. 78C: GC Content Adjustment. The ideal percentage range of GC content is between 30-70%. Peaks of % GC content in a 60 bp window have been removed. FIG. 78D: Restriction Enzymes and CIS-Acting Elements. FIG. 78E: Remove Repeat Sequences. FIG. 78F-G: Optimized Sequence (Optimized Sequence Length: 4119, GC % 51.88) (SEQ ID NO: 1276). FIG. 78H: Protein Sequence (SEQ ID NO: 1277).

[0134] FIGS. 79A-79H shows the details of the human codon optimized sequence for Porphyromonas macacae Cpf1 having a gene length of 3888 nts (Ref #17 in FIG. 64). FIG. 79A: Codon Adaptation Index (CAI). The distribution of codon usage frequency along the length of the gene sequence. A CAI of 1.0 is considered to be perfect in the desired expression organism, and a CAI of >0.8 is regarded as good, in terms of high gene expression level. FIG. 79B: Frequency of Optimal Codons (FOP). The percentage distribution of codons in computed codon quality groups. The value of 100 is set for the codon with the highest usage frequency for a given amino acid in the desired expression organism. FIG. 79C: GC Content Adjustment. The ideal percentage range of GC content is between 30-70%. Peaks of % GC content in a 60 bp window have been removed. FIG. 79D: Restriction Enzymes and CIS-Acting Elements. FIG. 79E: Remove Repeat Sequences. FIG. 79F-G: Optimized Sequence (Optimized Sequence Length: 3888, GC % 53.26) (SEQ ID NO: 1278). FIG. 79H: Protein Sequence (SEQ ID NO: 1279).

[0135] FIG. 80A-80I shows direct repeat (DR) sequences for each ortholog (refer to numbering Ref #3-17 in FIG. 64) and their predicted fold structure. SEQ ID NOS 1280-1313, respectively, are disclosed in order of appearance.

[0136] FIG. 81 shows cleavage of a PCR amplicon of the human Emx1 locus. SEQ ID NOS 1314-1318, respectively, are disclosed in order of appearance.

[0137] FIG. 82A-82B shows the effect of truncation in 5′ DR on cleavage Activity. FIG. 82A shows a gel in which cleavage results with 5 DR truncations is indicated. FIG. 82B shows a diagram in which crDNA deltaDR5 disrupted the stem loop at the 5′ end. This indicates that the stemloop at the 5′ end is essential for cleavage activity. SEQ ID NOS 1319-1324, respectively, are disclosed in order of appearance.

[0138] FIG. 83 shows the effect of crRNA-DNA target mismatch on cleavage efficiency. SEQ ID NOS 1325-1335, respectively, are disclosed in order of appearance.

[0139] FIG. 84 shows the cleavage of DNA using purified Francisella and Prevotella Cpf1. SEQ ID NO: 1336 is disclosed.

[0140] FIG. 85A-85B show diagrams of DR secondary structures. FIG. 85A shows a FnCpf1 DR secondary structure (SEQ ID NO: 1337) (stem loop highlighted). FIG. 85B shows a PaCpf1 DR secondary structure (SEQ ID NO: 1338) (stem loop highlighted, identical except for a single base difference in the loop region).

[0141] FIG. 86 shows a further depiction of the RNAseq analysis of the FnCp1 locus.

[0142] FIG. 87A-87B show schematics of mature crRNA sequences. FIG. 87A shows a mature crRNA sequences for FnCpf1. FIG. 87B shows a mature crRNA sequences for PaCpf1. SEQ ID NOS 1339-1342, respectively, are disclosed in order of appearance.

[0143] FIG. 88 shows cleavage of DNA using human codon optimized Francisella novicida FnCpf1. The top band corresponds to un-cleaved full length fragment (606 bp). Expected cleavage product sizes of ˜345 bp and ˜261 bp are indicated by triangles.

[0144] FIG. 89 shows in vitro ortholog assay demonstrating cleavage by Cpf1 orthologs.

[0145] FIGS. 90A-90C show computationally derived PAMs from the in vitro cutting assay.

[0146] FIG. 91 shows Cpf1 cutting in a staggered fashion with 5′ overhangs. SEQ ID NOS 1343-1345, respectively, are disclosed in order of appearance.

[0147] FIG. 92 shows effect of spacer length on cutting. SEQ ID NOS 1346-1352, respectively, are disclosed in order of appearance.

[0148] FIG. 93 shows SURVEYOR data for FnCpf1 mediated indels in HEK293T cells.

[0149] FIGS. 94A-94F show the processing of transcripts when sections of the FnCpf1 locus are deleted as compared to the processing of transcripts in a wild type FnCpf1 locus. FIGS. 95B, 95D and 95F zoom in on the processed spacer. SEQ ID NOS 1353-1401, respectively, are disclosed in order of appearance.

[0150] FIGS. 95A-95E show the Francisella tularensis subsp. novicida U112 Cpf1 CRISPR locus provides immunity against transformation of plasmids containing protospacers flanked by a 5′-TTN PAM. FIG. 95A show the organization of two CRISPR loci found in Francisella tularensis subsp. novicida U112 (NC_008601). The domain organization of FnCas9 and FnCpf1 are compared. FIG. 95B provide a schematic illustration of the plasmid depletion assay for discovering the PAM position and identity. Competent E. coli harboring either the heterologous FnCpf1 locus plasmid (pFnCpf1) or the empty vector control were transformed with a library of plasmids containing the matching protospacer flanked by randomized 5′ or 3′ PAM sequences and selected with antibiotic to deplete plasmids carrying successfully-targeted PAM. Plasmids from surviving colonies were extracted and sequenced to determine depleted PAM sequences. FIGS. 95C-95D show sequence logos for the FnCpf1 PAM as determined by the plasmid depletion assay. Letter height at position is determined by information content; error bars show 95% Bayesian confidence interval. FIG. 95E shows E. coli harboring pFnCpf1 demonstrate robust interference against plasmids carrying 5′-TTN PAMs (n=3, error bars represent mean±S.E.M.).

[0151] FIGS. 96A-96C shows heterologous expression of FnCpf1 and CRISPR array in E. coli is sufficient to mediate plasmid DNA interference and crRNA maturation. Small RNA-seq of Francisella tularensis subsp. novicida U112 (FIG. 96A) reveals transcription and processing of the FnCpf1 CRISPR array. The mature crRNA begins with a 19 nt partial direct repeat followed by 23-25 nt of spacer sequence. Small RNA-seq of E. coli transformed with a plasmid carrying synthetic promoter-driven FnCpf1 and CRISPR array (FIG. 96B) shows crRNA processing independent of Cas genes and other sequence elements in the FnCpf1 locus. FIG. 96C depicts E. coli harboring different truncations of the FnCpf1 CRISPR locus and shows that only FnCpf1 and the CRISPR array are required for plasmid DNA interference (n=3, error bars show mean±S.E.M.). SEQ ID NO: 1580 is disclosed.

[0152] FIGS. 97A-97E shows FnCpf1 is targeted by crRNA to cleave DNA in vitro. FIG. 97A is a schematic of the FnCpf1 crRNA-DNA targeting complex. Cleavage sites are indicated by red arrows (SEQ ID NOS 1402 and 1403, respectively, disclosed in order of appearance). FnCpf1 and crRNA alone mediated RNA-guided cleavage of target DNA in a crRNA- and Mg²⁺-dependent manner (FIG. 97B). FIG. 97C shows FnCpf1 cleaves both linear and supercoiled DNA. FIG. 97D shows Sanger sequencing traces from FnCpf1-digested target show staggered overhangs (SEQ ID NOS 1404 and 1406, respectively, disclosed in order of appearance). The non-templated addition of an additional adenine, denoted as N, is an artifact of the polymerase used in sequencing. Reverse primer read represented as reverse complement to aid visualization. FIG. 97E shows cleavage is dependent on base-pairing at the 5′ PAM. FnCpf1 can only recognize the PAM in correctly Watson-Crick paired DNA.

[0153] FIGS. 98A-98B shows catalytic residues in the C-terminal RuvC domain of FnCpf1 are necessary for DNA cleavage. FIG. 98A shows the domain structure of FnCpf1 with RuvC catalytic residues highlighted. The catalytic residues were identified based on sequence homology to Thermus thermophilus RuvC (PDB ID: 4EP5). FIG. 98B depicts a native TBE PAGE gel showing that mutation of the RuvC catalytic residues of FnCpf1 (D917A and E1006A) and mutation of the RuvC (D10A) catalytic residue of SpCas9 prevents double stranded DNA cleavage. Denaturing TBE-Urea PAGE gel showing that mutation of the RuvC catalytic residues of FnCpf1 (D917A and E1006A) prevents DNA nicking activity, whereas mutation of the RuvC (D10A) catalytic residue of SpCas9 results in nicking of the target site.

[0154] FIGS. 99A-99E shows crRNA requirements for FnCpf1 nuclease activity in vitro. FIG. 99A shows the effect of spacer length on FnCpf1 cleavage activity. FIG. 99B shows the effect of crRNA-target DNA mismatch on FnCpf1 cleavage activity. FIG. 99C demonstrates the effect of direct repeat length on FnCpf1 cleavage activity. FIG. 99D shows FnCpf1 cleavage activity depends on secondary structure in the stem of the direct repeat RNA structure. FIG. 99E shows FnCpf1 cleavage activity is unaffected by loop mutations but is sensitive to mutation in the 3′-most base of the direct repeat. SEQ ID NOS 1407-1433, respectively, disclosed in order of appearance.

[0155] FIGS. 100A-100F provides an analysis of Cpf1-family protein diversity and function. FIGS. 100A-100B show a phylogenetic comparison of 16 Cpf1 orthologs selected for functional analysis. Conserved sequences are shown in dark gray. The RuvC domain, bridge helix, and zinc finger are highlighted. FIG. 100C shows an alignment of direct repeats from the 16 Cpf1-family proteins. Sequences that are removed post crRNA maturation are colored gray. Non-conserved bases are colored red. The stem duplex is highlighted in gray. FIG. 100D depicts RNAfold (Lorenz et al., 2011) prediction of the direct repeat sequence in the mature crRNA. Predictions for FnCpf1 along with three less-conserved orthologs shown. FIG. 100E shows ortholog crRNAs with similar direct repeat sequences are able to function with FnCpf1 to mediate target DNA cleavage. FIG. 100F shows PAM sequences for 8 Cpf1-family proteins identified using in vitro cleavage of a plasmid library containing randomized PAMs flanking the protospacer. SEQ ID NOS 1434-1453, respectively, disclosed in order of appearance.

[0156] FIGS. 101A-101E shows Cpf1 mediates robust genome editing in human cell lines. FIG. 101A is a schemative showing expression of individual Cpf1-family proteins in HEK 293FT cells using CMV-driven expression vectors. The corresponding crRNA is expressed using a PCR fragment containing a U6 promoter fused to the crRNA sequence. Transfected cells were analyzed using either Surveyor nuclease assay or targeted deep sequencing. FIG. 101B (top) depicts the sequence of DNMT1-targeting crRNA 3, and sequencing reads (bottom) show representative indels. FIG. 101B discloses SEQ ID NOS 1454-1465, respectively, in order of appearance. FIG. 101C provides a comparison of in vitro and in vivo cleavage activity. The DNMT1 target region was PCR amplified and the genomic fragment was used to test Cpf1-mediated cleavage. All 8 Cpf1-family proteins showed DNA cleavage in vitro (top). Candidates 7—AsCpf1 and 13—Lb3Cpf1 facilitated robust indel formation in human cells (bottom). FIG. 101D shows Cpf1 and SpCas9 target sequences in the human DNMT1 locus (SEQ ID NOS 1466-1473, respectively, disclosed in order of appearance). FIG. 101E provides a comparison of Cpf1 and SpCas9 genome editing efficiency. Target sites correspond to sequences shown in FIG. 101D.

[0157] FIGS. 102A-102D shows an in vivo plasmid depletion assay for identifying FnCpf1 PAM. (See also FIG. 95). FIG. 102A: Transformation of E. coli harboring pFnCpf1 with a library of plasmids carrying randomized 5′ PAM sequences. A subset of plasmids were depleted. Plot shows depletion levels in ranked order. Depletion is measured as the negative log₂ fold ratio of normalized abundance compared pACYC184 E. coli controls. PAMs above a threshold of 3.5 are used to generate sequence logos. FIG. 102B: Transformation of E. coli harboring pFnCpf1 with a library of plasmids carrying randomized 3′ PAM sequences. A subset of plasmids were depleted. Plot shows depletion levels in ranked order. Depletion is measured as the negative log₂ fold ratio of normalized abundance compared pACYC184 E. coli controls and PAMs above a threshold of 3.5 are used to generate sequence logos. FIG. 102C: Input library of plasmids carrying randomized 5′ PAM sequences. Plot shows depletion levels in ranked order. Depletion is measured as the negative log₂ fold ratio of normalized abundance compared pACYC184 E. coli controls. PAMs above a threshold of 3.5 are used to generate sequence logos. FIG. 102D: The number of unique PAMs passing significance threshold for pairwise combinations of bases at the 2 and 3 positions of the 5′ PAM.

[0158] FIGS. 103A-103D shows FnCpf1 Protein Purification. (See also FIG. 97). FIG. 103A depicts a Coomassie blue stained acrylamide gel of FnCpf1 showing stepwise purification. A band just above 160 kD eluted from the Ni-NTA column, consistent with the size of a MBP-FnCpf1 fusion (189.7 kD). Upon addition of TEV protease a lower molecular weight band appeared, consistent with the size of 147 kD free FnCpf1. FIG. 103B: Size exclusion gel filtration of fnCpf1. FnCpf1 eluted at a size approximately 300 kD (62.65 mL), suggesting Cpf1 may exist in solution as a dimer. FIG. 103C shows protein standards used to calibrate the Superdex 200 column. BDex=Blue Dextran (void volume), Ald=Aldolase (158 kD), Ov=Ovalbumin (44 kD), RibA=Ribonuclease A (13.7 kD), Apr=Aprotinin (6.5 kD). FIG. 103D: Calibration curve of the Superdex 200 column. Kₐ is calculated as (elution volume−void volume)/(geometric column volume−void volume). Standards were plotted and fit to a logarithmic curve.

[0159] FIGS. 104A-104E shows cleavage patterns of FnCpf1. (See also FIG. 97). Sanger sequencing traces from FnCpf1-digested DNA targets show staggered overhangs. The non-templated addition of an additional adenine, denoted as N, is an artifact of the polymerase used in sequencing. Sanger traces are shown for different TTN PAMs with protospacer 1 (FIG. 104A), protospacer 2 (FIG. 104B), and protospacer 3 (FIG. 104C) and targets DNMT1 and EMX1 (FIG. 104D). The (−) strand sequence is reverse-complemented to show the top strand sequence. Cleavage sites are indicated by red triangles. Smaller triangles indicate putative alternative cleavage sites. FIG. 104E shows the effect of PAM-distal crRNA-target DNA mismatch on FnCpf1 cleavage activity. SEQ ID NOS 1474-1494, respectively, disclosed in order of appearance.

[0160] FIGS. 105A-105B shows an amino acid sequence alignment of FnCpf1 (SEQ ID NO: 1495), AsCpf1 (SEQ ID NO: 1496), and LbCpf1 (SEQ ID NO: 1497). (See also FIG. 100). Residues that are conserved are highlighted with a red background and conserved mutations are highlighted with an outline and red font. Secondary structure prediction is highlighted above (FnCpf1) and below (LbCpf1) the alignment. Alpha helices are shown as a curly symbol and beta strands are shown as dashes. Protein domains identified in FIG. 95A are also highlighted.

[0161] FIGS. 106A-106D provides maps bacterial genomic loci corresponding to the 16 Cpf1-family proteins selected for mammalian experimentation. (See also FIG. 100). FIGS. 106A-106D disclose SEQ ID NOS 1498-1513, respectively, in order of appearance.

[0162] FIGS. 107A-107E shows in vitro characterization of Cpf1-family proteins. FIG. 107A is a schematic for in vitro PAM screen using Cpf1-family proteins. A library of plasmids bearing randomized 5′ PAM sequences were cleaved by individual Cpf1-family proteins and their corresponding crRNAs. Uncleaved plasmid DNA was purified and sequenced to identify specific PAM motifs that were depleted. FIG. 107B indicates the number of unique sequences passing significance threshold for pairwise combinations of bases at the 2 and 3 positions of the 5′ PAM for 7—AsCpf1. FIG. 107C indicates the number of unique PAMs passing significance threshold for triple combinations of bases at the 2, 3, and 4 positions of the 5′ PAM for 13—LbCpf1. FIGS. 107D-107E E and F show Sanger sequencing traces from 7—AsCpf1-digested target (FIG. 107E) and 13—LbCpf1-digested target (FIG. 107F) and show staggered overhangs. The non-templated addition of an additional adenine, denoted as N, is an artifact of the polymerase used in sequencing. Cleavage sites are indicated by red triangles. Smaller triangles indicate putative alternative cleavage sites. FIG. 107D-E discloses SEQ ID NOS 1514-1519, respectively, in order of appearance.

[0163] FIGS. 108A-108F indicates human cell genome editing efficiency at additional loci. Surveyor gels show quantification of indel efficiency achieved by each Cpf1-family protein at DNMT1 target sites 1 (FIG. 108A), 2 (FIG. 108B), and 4 (FIG. 108C). FIGS. 108A-108C indicate human cell genome editing efficiency at additional loci and Sanger sequencing of cleaved of DNMT target sites. Surveyor gels show quantification of indel efficiency achieved by each Cpf1-family protein at EMX1 target sites 1 (FIG. 108D) and 2 (FIG. 108E). Indel distributions for AsCpf1 and LbCpf1 and DNMT1 target sites 2, 3, and 4 (FIG. 108F). Cyan bars represent total indel coverage; blue bars represent distribution of 3′ ends of indels. For each target, PAM sequence is in red and target sequence is in light blue.

[0164] FIGS. 109A-109C depicts a computational analysis of the primary structure of Cpf1 nucleases reveals three distinct regions. First a C-terminal RuvC like domain, which is the only functional characterized domain. Second a N-terminal alpha-helical region and thirst a mixed alpha and beta region, located between the RuvC like domain and the alpha-helical region.

[0165] FIGS. 110A-110E depict an AsCpf1 Rad50 alignment (PDB 4W9M). SEQ ID NOS 1520 and 1521, respectively, disclosed in order of appearance. FIG. 110C depicts an AsCpf1 RuvC alignment (PDB 4LD0). SEQ ID NOS 1522 and 1523, respectively, disclosed in order of appearance. FIGS. 110D-110E depicts an alignment of AsCpf1 and FnCpf1 which identifies Rad50 domain in FnCpf1. SEQ ID NOS 1524 and 1525, respectively, disclosed in order of appearance.

[0166] FIG. 111 depicts a structure of Rad50 (4W9M) in complex with DNA. DNA interacting residues are highlighted (in red).

[0167] FIG. 112 depicts a structure of RuvC (4LD0) in complex with holiday junction. DNA interacting residues are highlighted in red.

[0168] FIG. 113 depicts a blast of AsCpf1 aligns to a region of the site specific recombinase XerD. An active site regions of XerD is LYWTGMR (SEQ ID NO: 1) with R being a catalytic residue. SEQ ID NOS 1526-1527, respectively, disclosed in order of appearance.

[0169] FIG. 114 depicts a region is conserved in Cpf1 orthologs (Yellow box) and although the R is not conserved, a highly conserved aspartic acid (orange box) is just C-terminal of this region and a nearby conserved region (blue box) with an absolutely conserved arginine. The aspartic acid is D732 in LbCpf1. SEQ ID NOS 1204 and 1528-1579, respectively, disclosed in order of appearance.

[0170] FIG. 115A shows an experiment where 150,000 HEK293T cells were plated per 24-well 24 h before transfection. Cells were transfected with 400 ng huAsCpf1 plasmid and 100 ng of tandem guide plasmid comprising one guide sequence directed to GRIN28 and one directed to EMX1 placed in tandem behind the U6 promoter, using Lipofectamin2000. Cells were harvested 72 h after transfection and AsCpf1 activity mediated by tandem guides was assayed using the SURVEYOR nuclease assay.

[0171] FIG. 115B demonstrates INDEL formation in both the GRIN28 and the EMX1 gene.

[0172] FIG. 116 shows FnCpf1 cleavage of an array with increasing concentrations of EDTA (and decreasing concentrations of Mg2+). The buffer is 20 mM TrisHCl pH 7 (room temperature), 50 mM KCl, and includes a murine RNAse inhibitor to prevent degradation of RNA due to potential trace amount of non-specific RNase carried over from protein purification.

[0173] The figures herein are for illustrative purposes only and are not necessarily drawn to scale.

### DETAILED DESCRIPTION OF THE INVENTION

[0174] The present application describes novel RNA-guided endonucleases (e.g. Cpf1 effector proteins) which are functionally distinct from the CRISPR-Cas9 systems described previously and hence the terminology of elements associated with these novel endonucleases are modified accordingly herein. Cpf1-associated CRISPR arrays described herein are processed into mature crRNAs without the requirement of an additional tracrRNA. The crRNAs described herein comprise a spacer sequence (or guide sequence) and a direct repeat sequence and a Cpf1p-crRNA complex by itself is sufficient to efficiently cleave target DNA. The seed sequence described herein, e.g. the seed sequence of a FnCpf1 guide RNA is approximately within the first 5 nt on the 5′ end of the spacer sequence (or guide sequence) and mutations within the seed sequence adversely affect cleavage activity of the Cpf1 effector protein complex.

[0175] In general, a CRISPR system is characterized by elements that promote the formation of a CRISPR complex at the site of a target sequence (also referred to as a protospacer in the context of an endogenous CRISPR system). In the context of formation of a CRISPR complex, “target sequence” refers to a sequence to which a guide sequence is designed to target, e.g. have complementarity, where hybridization between a target sequence and a guide sequence promotes the formation of a CRISPR complex. The section of the guide sequence through which complementarity to the target sequence is important for cleavage activity is referred to herein as the seed sequence. A target sequence may comprise any polynucleotide, such as DNA or RNA polynucleotides and is comprised within a target locus of interest. In some embodiments, a target sequence is located in the nucleus or cytoplasm of a cell. The herein described invention encompasses novel effector proteins of Class 2 CRISPR-Cas systems, of which Cas9 is an exemplary effector protein and hence terms used in this application to describe novel effector proteins, may correlate to the terms used to describe the CRISPR-Cas9 system.

[0176] The CRISPR-Cas loci has more than 50 gene families and there is no strictly universal genes. Therefore, no single evolutionary tree is feasible and a multi-pronged approach is needed to identify new families. So far, there is comprehensive cas gene identification of 395 profiles for 93 Cas proteins. Classification includes signature gene profiles plus signatures of locus architecture. A new classification of CRISPR-Cas systems is proposed in FIG. 1. Class 1 includes multisubunit crRNA-effector complexes (Cascade) and Class 2 includes Single-subunit crRNA-effector complexes (Cas9-like). FIG. 2 provides a molecular organization of CRISPR-Cas. FIG. 3 provides structures of Type I and III effector complexes: common architecture/common ancestry despite extensive sequence divergence. FIG. 4 shows CRISPR-Cas as a RNA recognition motif (RRM)-centered system. FIG. 5 shows Cas1 phylogeny where recombination of adaptation and crRNA-effector modules show a major aspect of CRISPR-Cas evolution. FIG. 6 shows a CRISPR-Cas census, specifically a distribution of CRISPR-Cas types/subtypes among archaea and bacteria.

[0177] The action of the CRISPR-Cas system is usually divided into three stages: (1) adaptation or spacer integration, (2) processing of the primary transcript of the CRISPR locus (pre-crRNA) and maturation of the crRNA which includes the spacer and variable regions corresponding to 5′ and 3′ fragments of CRISPR repeats, and (3) DNA (or RNA) interference. Two proteins, Cas1 and Cas2, that are present in the great majority of the known CRISPR-Cas systems are sufficient for the insertion of spacers into the CRISPR cassettes. These two proteins form a complex that is required for this adaptation process; the endonuclease activity of Cas1 is required for spacer integration whereas Cas2 appears to perform a nonenzymatic function. The Cas1-Cas2 complex represents the highly conserved “information processing” module of CRISPR-Cas that appears to be quasi-autonomous from the rest of the system. (See Annotation and Classification of CRISPR-Cas Systems. Makarova K S, Koonin E V. Methods Mol Biol. 2015; 1311:47-75).

[0178] The previously described Class 2 systems, namely Type II and the putative Type V, consisted of only three or four genes in the cas operon, namely the cas1 and cas2 genes comprising the adaptation module (the cas1-cas2 pair of genes are not involved in interference), a single multidomain effector protein that is responsible for interference but also contributes to the pre-crRNA processing and adaptation, and often a fourth gene with uncharacterized functions that is dispensable in at least some Type II systems (and in some cases the fourth gene is cas4 (biochemical or in silico evidence shows that Cas4 is a PD-(DE)xK superfamily nuclease with three-cysteine C-terminal cluster; possesses 5′-ssDNA exonuclease activity) or csn2, which encodes an inactivated ATPase). In most cases, a CRISPR array and a gene for a distinct RNA species known as tracrRNA, a trans-encoded small CRISPR RNA, are adjacent to Class 2 cas operons. The tracrRNA is partially homologous to the repeats within the respective CRISPR array and is essential for the processing of pre-crRNA that is catalyzed by RNAse III, a ubiquitous bacterial enzyme that is not associated with the CRISPR-Cas loci.

[0179] Cas1 is the most conserved protein that is present in most of the CRISPR-Cas systems and evolves slower than other Cas proteins. Accordingly, Cas1 phylogeny has been used as the guide for CRISPR-Cas system classification. Biochemical or in silico evidence shows that Cas1 is a metal-dependent deoxyribonuclease. Deletion of Cas1 in E. coli results in increased sensitivity to DNA damage and impaired chromosomal segregation as described in “A dual function of the CRISPR-Cassystem in bacterial antivirus immunity and DNA repair,” Babu M et al. Mol Microbiol 79:484-502 (2011). Biochemical or in silico evidence shows that Cas 2 is a RNase specific to U-rich regions and is a double-stranded DNase.

[0180] Aspects of the invention relate to the identification and engineering of novel effector proteins associated with Class 2 CRISPR-Cas systems. In a preferred embodiment, the effector protein comprises a single-subunit effector module. In a further embodiment the effector protein is functional in prokaryotic or eukaryotic cells for in vitro, in vivo or ex vivo applications. An aspect of the invention encompasses computational methods and algorithms to predict new Class 2 CRISPR-Cas systems and identify the components therein.

[0181] In one embodiment, a computational method of identifying novel Class 2 CRISPR-Cas loci comprises the following steps: detecting all contigs encoding the Cas1 protein; identifying all predicted protein coding genes within 20 kB of the cas1 gene; comparing the identified genes with Cas protein-specific profiles and predicting CRISPR arrays; selecting unclassified candidate CRISPR-Cas loci containing proteins larger than 500 amino acids (>500 aa); analyzing selected candidates using PSI-BLAST and HHPred, thereby isolating and identifying novel Class 2 CRISPR-Cas loci. In addition to the above mentioned steps, additional analysis of the candidates may be conducted by searching metagenomics databases for additional homologs.

[0182] In one aspect the detecting all contigs encoding the Cas1 protein is performed by GenemarkS which a gene prediction program as further described in “GeneMarkS: a self-training method for prediction of gene starts in microbial genomes. Implications for finding sequence motifs in regulatory regions.” John Besemer, Alexandre Lomsadze and Mark Borodovsky, Nucleic Acids Research (2001) 29, pp 2607-2618, herein incorporated by reference.

[0183] In one aspect the identifying all predicted protein coding genes is carried out by comparing the identified genes with Cas protein-specific profiles and annotating them according to NCBI Conserved Domain Database (CDD) which is a protein annotation resource that consists of a collection of well-annotated multiple sequence alignment models for ancient domains and full-length proteins. These are available as position-specific score matrices (PSSMs) for fast identification of conserved domains in protein sequences via RPS-BLAST. CDD content includes NCBI-curated domains, which use 3D-structure information to explicitly define domain boundaries and provide insights into sequence/structure/function relationships, as well as domain models imported from a number of external source databases (Pfam, SMART, COG, PRK, TIGRFAM). In a further aspect, CRISPR arrays were predicted using a PILER-CR program which is a public domain software for finding CRISPR repeats as described in “PILER-CR: fast and accurate identification of CRISPR repeats”, Edgar, R. C., BMC Bioinformatics, January 20; 8:18(2007), herein incorporated by reference.

[0184] In a further aspect, the case by case analysis is performed using PSI-BLAST (Position-Specific Iterative Basic Local Alignment Search Tool). PSI-BLAST derives a position-specific scoring matrix (PSSM) or profile from the multiple sequence alignment of sequences detected above a given score threshold using protein-protein BLAST. This PSSM is used to further search the database for new matches, and is updated for subsequent iterations with these newly detected sequences. Thus, PSI-BLAST provides a means of detecting distant relationships between proteins.

[0185] In another aspect, the case by case analysis is performed using HHpred, a method for sequence database searching and structure prediction that is as easy to use as BLAST or PSI-BLAST and that is at the same time much more sensitive in finding remote homologs. In fact, HHpred's sensitivity is competitive with the most powerful servers for structure prediction currently available. HHpred is the first server that is based on the pairwise comparison of profile hidden Markov models (HMMs). Whereas most conventional sequence search methods search sequence databases such as UniProt or the NR, HHpred searches alignment databases, like Pfam or SMART. This greatly simplifies the list of hits to a number of sequence families instead of a clutter of single sequences. All major publicly available profile and alignment databases are available through HHpred. HHpred accepts a single query sequence or a multiple alignment as input. Within only a few minutes it returns the search results in an easy-to-read format similar to that of PSI-BLAST. Search options include local or global alignment and scoring secondary structure similarity. HHpred can produce pairwise query-template sequence alignments, merged query-template multiple alignments (e.g. for transitive searches), as well as 3D structural models calculated by the MODELLER software from HHpred alignments.

[0186] The term “nucleic acid-targeting system”, wherein nucleic acid is DNA or RNA, and in some aspects may also refer to DNA-RNA hybrids or derivatives thereof, refers collectively to transcripts and other elements involved in the expression of or directing the activity of DNA or RNA-targeting CRISPR-associated (“Cas”) genes, which may include sequences encoding a DNA or RNA-targeting Cas protein and a DNA or RNA-targeting guide RNA comprising a CRISPR RNA (crRNA) sequence and (in CRISPR-Cas9 system but not all systems) a trans-activating CRISPR-Cas system RNA (tracrRNA) sequence, or other sequences and transcripts from a DNA or RNA-targeting CRISPR locus. In the Cpf1 DNA targeting RNA-guided endonuclease systems described herein, a tracrRNA sequence is not required. In general, a RNA-targeting system is characterized by elements that promote the formation of a RNA-targeting complex at the site of a target RNA sequence. In the context of formation of a DNA or RNA-targeting complex, “target sequence” refers to a DNA or RNA sequence to which a DNA or RNA-targeting guide RNA is designed to have complementarity, where hybridization between a target sequence and a RNA-targeting guide RNA promotes the formation of a RNA-targeting complex. In some embodiments, a target sequence is located in the nucleus or cytoplasm of a cell.

[0187] In an aspect of the invention, novel DNA targeting systems also referred to as DNA-targeting CRISPR-Cas or the CRISPR-Cas DNA-targeting system of the present application are based on identified Type V (e.g. subtype V-A and subtype V-B) Cas proteins which do not require the generation of customized proteins to target specific DNA sequences but rather a single effector protein or enzyme can be programmed by a RNA molecule to recognize a specific DNA target, in other words the enzyme can be recruited to a specific DNA target using said RNA molecule. Aspects of the invention particularly relate to DNA targeting RNA-guided Cpf1 CRISPR systems.

[0188] In an aspect of the invention, novel RNA targeting systems also referred to as RNA- or RNA-targeting CRISPR-Cas or the CRISPR-Cas system RNA-targeting system of the present application are based on identified Type VI Cas proteins which do not require the generation of customized proteins to target specific RNA sequences but rather a single enzyme can be programmed by a RNA molecule to recognize a specific RNA target, in other words the enzyme can be recruited to a specific RNA target using said RNA molecule.

[0189] The nucleic acids-targeting systems, the vector systems, the vectors and the compositions described herein may be used in various nucleic acids-targeting applications, altering or modifying synthesis of a gene product, such as a protein, nucleic acids cleavage, nucleic acids editing, nucleic acids splicing; trafficking of target nucleic acids, tracing of target nucleic acids, isolation of target nucleic acids, visualization of target nucleic acids, etc.

[0190] As used herein, a Cas protein or a CRISPR enzyme refers to any of the proteins presented in the new classification of CRISPR-Cas systems. In an advantageous embodiment, the present invention encompasses effector proteins identified in a Type V CRISPR-Cas loci, e.g. a Cpf1-encoding loci denoted as subtype V-A. Presently, the subtype V-A loci encompasses cas1, cas2, a distinct gene denoted cpf1 and a CRISPR array. Cpf1 (CRISPR-associated protein Cpf1, subtype PREFRAN) is a large protein (about 1300 amino acids) that contains a RuvC-like nuclease domain homologous to the corresponding domain of Cas9 along with a counterpart to the characteristic arginine-rich cluster of Cas9. However, Cpf1 lacks the HNH nuclease domain that is present in all Cas9 proteins, and the RuvC-like domain is contiguous in the Cpf1 sequence, in contrast to Cas9 where it contains long inserts including the HNH domain. Accordingly, in particular embodiments, the CRISPR-Cas enzyme comprises only a RuvC-like nuclease domain.

[0191] The Cpf1 gene is found in several diverse bacterial genomes, typically in the same locus with cas1, cas2, and cas4 genes and a CRISPR cassette (for example, FNFX1_1431-FNFX1_1428 of Francisella cf. novicida Fx1). Thus, the layout of this putative novel CRISPR-Cas system appears to be similar to that of type II-B. Furthermore, similar to Cas9, the Cpf1 protein contains a readily identifiable C-terminal region that is homologous to the transposon ORF-B and includes an active RuvC-like nuclease, an arginine-rich region, and a Zn finger (absent in Cas9). However, unlike Cas9, Cpf1 is also present in several genomes without a CRISPR-Cas context and its relatively high similarity with ORF-B suggests that it might be a transposon component. It was suggested that if this was a genuine CRISPR-Cas system and Cpf1 is a functional analog of Cas9 it would be a novel CRISPR-Cas type, namely type V (See Annotation and Classification of CRISPR-Cas Systems. Makarova K S, Koonin E V. Methods Mol Biol. 2015; 1311:47-75). However, as described herein, Cpf1 is denoted to be in subtype V-A to distinguish it from C2c1p which does not have an identical domain structure and is hence denoted to be in subtype V-B.

[0192] In an advantageous embodiment, the present invention encompasses compositions and systems comprising effector proteins identified in a C2c1 loci denoted as subtype V-B. Herein, C2c1 refers to Class 2 candidate 1. All C2c1 loci encode a Cas1-Cas4 fusion, Cas2, and the large protein Applicants denote as C2c1p, and typically, are adjacent to a CRISPR array.

[0193] In an advantageous embodiment, the present invention encompasses effector proteins identified in a Type VI CRISPR-Cas loci, e.g. the C2c2 loci. Herein, C2c2 refers to Class 2 candidate 2. The C2c2 loci encompass cas1 and cas2 genes along with the large protein Applicants denote as C2c2p, and a CRISPR array; however, unlike C2c1p, C2c2p is often encoded next to a CRISPR array but not cas1-cas2 (compare FIGS. 9 and 13).

[0194] Aspects of the invention also encompass methods and uses of the compositions and systems described herein in genome engineering, e.g. for altering or manipulating the expression of one or more genes or the one or more gene products, in prokaryotic or eukaryotic cells, in vitro, in vivo or ex vivo.

[0195] In embodiments of the invention the terms mature crRNA and guide RNA and single guide RNA are used interchangeably as in foregoing cited documents such as WO 2014/093622 (PCT/US2013/074667). In general, a guide sequence is any polynucleotide sequence having sufficient complementarity with a target polynucleotide sequence to hybridize with the target sequence and direct sequence-specific binding of a CRISPR complex to the target sequence. In some embodiments, the degree of complementarity between a guide sequence and its corresponding target sequence, when optimally aligned using a suitable alignment algorithm, is about or more than about 50%, 60%, 75%, 80%, 85%, 90%, 95%, 97.5%, 99%, or more. Optimal alignment may be determined with the use of any suitable algorithm for aligning sequences, non-limiting example of which include the Smith-Waterman algorithm, the Needleman-Wunsch algorithm, algorithms based on the Burrows-Wheeler Transform (e.g., the Burrows Wheeler Aligner), ClustalW, Clustal X, BLAT, Novoalign (Novocraft Technologies; available at www.novocraft.com), ELAND (Illumina, San Diego, Calif.), SOAP (available at soap.genomics.org.cn), and Maq (available at maq.sourceforge.net). In some embodiments, a guide sequence is about or more than about 5, 10, 11, 12, 13, 14, 15, 16, 17, 18, 19, 20, 21, 22, 23, 24, 25, 26, 27, 28, 29, 30, 35, 40, 45, 50, 75, or more nucleotides in length. In some embodiments, a guide sequence is less than about 75, 50, 45, 40, 35, 30, 25, 20, 15, 12, or fewer nucleotides in length. Preferably the guide sequence is 10-30 nucleotides long. The ability of a guide sequence to direct sequence-specific binding of a CRISPR complex to a target sequence may be assessed by any suitable assay. For example, the components of a CRISPR system sufficient to form a CRISPR complex, including the guide sequence to be tested, may be provided to a host cell having the corresponding target sequence, such as by transfection with vectors encoding the components of the CRISPR sequence, followed by an assessment of preferential cleavage within the target sequence, such as by Surveyor assay as described herein. Similarly, cleavage of a target polynucleotide sequence may be evaluated in a test tube by providing the target sequence, components of a CRISPR complex, including the guide sequence to be tested and a control guide sequence different from the test guide sequence, and comparing binding or rate of cleavage at the target sequence between the test and control guide sequence reactions. Other assays are possible, and will occur to those skilled in the art. A guide sequence may be selected to target any target sequence. In some embodiments, the target sequence is a sequence within a genome of a cell. Exemplary target sequences include those that are unique in the target genome.

[0196] In general, and throughout this specification, the term “vector” refers to a nucleic acid molecule capable of transporting another nucleic acid to which it has been linked. Vectors include, but are not limited to, nucleic acid molecules that are single-stranded, double-stranded, or partially double-stranded; nucleic acid molecules that comprise one or more free ends, no free ends (e.g., circular); nucleic acid molecules that comprise DNA, RNA, or both; and other varieties of polynucleotides known in the art. One type of vector is a “plasmid,” which refers to a circular double stranded DNA loop into which additional DNA segments can be inserted, such as by standard molecular cloning techniques. Another type of vector is a viral vector, wherein virally-derived DNA or RNA sequences are present in the vector for packaging into a virus (e.g., retroviruses, replication defective retroviruses, adenoviruses, replication defective adenoviruses, and adeno-associated viruses). Viral vectors also include polynucleotides carried by a virus for transfection into a host cell. Certain vectors are capable of autonomous replication in a host cell into which they are introduced (e.g., bacterial vectors having a bacterial origin of replication and episomal mammalian vectors). Other vectors (e.g., non-episomal mammalian vectors) are integrated into the genome of a host cell upon introduction into the host cell, and thereby are replicated along with the host genome. Moreover, certain vectors are capable of directing the expression of genes to which they are operatively-linked. Such vectors are referred to herein as “expression vectors.” Vectors for and that result in expression in a eukaryotic cell can be referred to herein as “eukaryotic expression vectors.” Common expression vectors of utility in recombinant DNA techniques are often in the form of plasmids.

[0197] Recombinant expression vectors can comprise a nucleic acid of the invention in a form suitable for expression of the nucleic acid in a host cell, which means that the recombinant expression vectors include one or more regulatory elements, which may be selected on the basis of the host cells to be used for expression, that is operatively-linked to the nucleic acid sequence to be expressed. Within a recombinant expression vector, “operably linked” is intended to mean that the nucleotide sequence of interest is linked to the regulatory element(s) in a manner that allows for expression of the nucleotide sequence (e.g., in an in vitro transcription/translation system or in a host cell when the vector is introduced into the host cell).

[0198] The term “regulatory element” is intended to include promoters, enhancers, internal ribosomal entry sites (IRES), and other expression control elements (e.g., transcription termination signals, such as polyadenylation signals and poly-U sequences). Such regulatory elements are described, for example, in Goeddel, GENE EXPRESSION TECHNOLOGY: METHODS IN ENZYMOLOGY 185, Academic Press, San Diego, Calif. (1990). Regulatory elements include those that direct constitutive expression of a nucleotide sequence in many types of host cell and those that direct expression of the nucleotide sequence only in certain host cells (e.g., tissue-specific regulatory sequences). A tissue-specific promoter may direct expression primarily in a desired tissue of interest, such as muscle, neuron, bone, skin, blood, specific organs (e.g., liver, pancreas), or particular cell types (e.g., lymphocytes). Regulatory elements may also direct expression in a temporal-dependent manner, such as in a cell-cycle dependent or developmental stage-dependent manner, which may or may not also be tissue or cell-type specific. In some embodiments, a vector comprises one or more pol III promoter (e.g., 1, 2, 3, 4, 5, or more pol III promoters), one or more pol II promoters (e.g., 1, 2, 3, 4, 5, or more pol II promoters), one or more pol I promoters (e.g., 1, 2, 3, 4, 5, or more pol I promoters), or combinations thereof. Examples of pol III promoters include, but are not limited to, U6 and H1 promoters. Examples of pol II promoters include, but are not limited to, the retroviral Rous sarcoma virus (RSV) LTR promoter (optionally with the RSV enhancer), the cytomegalovirus (CMV) promoter (optionally with the CMV enhancer) [see, e.g., Boshart et al, Cell, 41:521-530 (1985)], the SV40 promoter, the dihydrofolate reductase promoter, the β-actin promoter, the phosphoglycerol kinase (PGK) promoter, and the EF1α promoter. Also encompassed by the term “regulatory element” are enhancer elements, such as WPRE; CMV enhancers; the R-U5′ segment in LTR of HTLV-I (Mol. Cell. Biol., Vol. 8(1), p. 466-472, 1988); SV40 enhancer; and the intron sequence between exons 2 and 3 of rabbit β-globin (Proc. Natl. Acad. Sci. USA., Vol. 78(3), p. 1527-31, 1981). It will be appreciated by those skilled in the art that the design of the expression vector can depend on such factors as the choice of the host cell to be transformed, the level of expression desired, etc. A vector can be introduced into host cells to thereby produce transcripts, proteins, or peptides, including fusion proteins or peptides, encoded by nucleic acids as described herein (e.g., clustered regularly interspersed short palindromic repeats (CRISPR) transcripts, proteins, enzymes, mutant forms thereof, fusion proteins thereof, etc.).

[0199] Advantageous vectors include lentiviruses and adeno-associated viruses, and types of such vectors can also be selected for targeting particular types of cells.

[0200] As used herein, the term “crRNA” or “guide RNA” or “single guide RNA” or “sgRNA” or “one or more nucleic acid components” of a Type V or Type VI CRISPR-Cas locus effector protein comprises any polynucleotide sequence having sufficient complementarity with a target nucleic acid sequence to hybridize with the target nucleic acid sequence and direct sequence-specific binding of a nucleic acid-targeting complex to the target nucleic acid sequence. In some embodiments, the degree of complementarity, when optimally aligned using a suitable alignment algorithm, is about or more than about 50%, 60%, 75%, 80%, 85%, 90%, 95%, 97.5%, 99%, or more. Optimal alignment may be determined with the use of any suitable algorithm for aligning sequences, non-limiting example of which include the Smith-Waterman algorithm, the Needleman-Wunsch algorithm, algorithms based on the Burrows-Wheeler Transform (e.g., the Burrows Wheeler Aligner), ClustalW, Clustal X, BLAT, Novoalign (Novocraft Technologies; available at www.novocraft.com), ELAND (Illumina, San Diego, Calif.), SOAP (available at soap.genomics.org.cn), and Maq (available at maq.sourceforge.net). The ability of a guide sequence (within a nucleic acid-targeting guide RNA) to direct sequence-specific binding of a nucleic acid-targeting complex to a target nucleic acid sequence may be assessed by any suitable assay. For example, the components of a nucleic acid-targeting CRISPR system sufficient to form a nucleic acid-targeting complex, including the guide sequence to be tested, may be provided to a host cell having the corresponding target nucleic acid sequence, such as by transfection with vectors encoding the components of the nucleic acid-targeting complex, followed by an assessment of preferential targeting (e.g., cleavage) within the target nucleic acid sequence, such as by Surveyor assay as described herein. Similarly, cleavage of a target nucleic acid sequence may be evaluated in a test tube by providing the target nucleic acid sequence, components of a nucleic acid-targeting complex, including the guide sequence to be tested and a control guide sequence different from the test guide sequence, and comparing binding or rate of cleavage at the target sequence between the test and control guide sequence reactions. Other assays are possible, and will occur to those skilled in the art. A guide sequence, and hence a nucleic acid-targeting guide RNA may be selected to target any target nucleic acid sequence. The target sequence may be DNA. The target sequence may be any RNA sequence. In some embodiments, the target sequence may be a sequence within a RNA molecule selected from the group consisting of messenger RNA (mRNA), pre-mRNA, ribosomaal RNA (rRNA), transfer RNA (tRNA), micro-RNA (miRNA), small interfering RNA (siRNA), small nuclear RNA (snRNA), small nucleolar RNA (snoRNA), double stranded RNA (dsRNA), non coding RNA (ncRNA), long non-coding RNA (lncRNA), and small cytoplasmatic RNA (scRNA). In some preferred embodiments, the target sequence may be a sequence within a RNA molecule selected from the group consisting of mRNA, pre-mRNA, and rRNA. In some preferred embodiments, the target sequence may be a sequence within a RNA molecule selected from the group consisting of ncRNA, and lncRNA. In some more preferred embodiments, the target sequence may be a sequence within an mRNA molecule or a pre-mRNA molecule.

[0201] In some embodiments, a nucleic acid-targeting guide RNA is selected to reduce the degree secondary structure within the RNA-targeting guide RNA. In some embodiments, about or less than about 75%, 50%, 40%, 30%, 25%, 20%, 15%, 10%, 5%, 1%, or fewer of the nucleotides of the nucleic acid-targeting guide RNA participate in self-complementary base pairing when optimally folded. Optimal folding may be determined by any suitable polynucleotide folding algorithm. Some programs are based on calculating the minimal Gibbs free energy. An example of one such algorithm is mFold, as described by Zuker and Stiegler (Nucleic Acids Res. 9 (1981), 133-148). Another example folding algorithm is the online webserver RNAfold, developed at Institute for Theoretical Chemistry at the University of Vienna, using the centroid structure prediction algorithm (see e.g., A. R. Gruber et al., 2008, Cell 106(1): 23-24; and P A Carr and G M Church, 2009, Nature Biotechnology 27(12): 1151-62).

[0202] The “tracrRNA” sequence or analogous terms includes any polynucleotide sequence that has sufficient complementarity with a crRNA sequence to hybridize. As indicated herein above, in embodiments of the present invention, the tracrRNA is not required for cleavage activity of Cpf1 effector protein complexes.

[0203] Applicants also perform a challenge experiment to verify the DNA targeting and cleaving capability of a Type V/Type VI protein such as Cpf1/C2c1/C2c2. This experiment closely parallels similar work in E. coli for the heterologous expression of StCas9 (Sapranauskas, R. et al. Nucleic Acids Res 39, 9275-9282 (2011)). Applicants introduce a plasmid containing both a PAM and a resistance gene into the heterologous E. coli, and then plate on the corresponding antibiotic. If there is DNA cleavage of the plasmid, Applicants observe no viable colonies.

[0204] In further detail, the assay is as follows for a DNA target. Two E. coli strains are used in this assay. One carries a plasmid that encodes the endogenous effector protein locus from the bacterial strain. The other strain carries an empty plasmid (e.g. pACYC184, control strain). All possible 7 or 8 bp PAM sequences are presented on an antibiotic resistance plasmid (pUC19 with ampicillin resistance gene). The PAM is located next to the sequence of proto-spacer 1 (the DNA target to the first spacer in the endogenous effector protein locus). Two PAM libraries were cloned. One has a 8 random by 5′ of the proto-spacer (e.g. total of 65536 different PAM sequences=complexity). The other library has 7 random by 3′ of the proto-spacer (e.g. total complexity is 16384 different PAMs). Both libraries were cloned to have in average 500 plasmids per possible PAM. Test strain and control strain were transformed with 5′PAM and 3′PAM library in separate transformations and transformed cells were plated separately on ampicillin plates. Recognition and subsequent cutting/interference with the plasmid renders a cell vulnerable to ampicillin and prevents growth. Approximately 12 h after transformation, all colonies formed by the test and control strains where harvested and plasmid DNA was isolated. Plasmid DNA was used as template for PCR amplification and subsequent deep sequencing. Representation of all PAMs in the untransfomed libraries showed the expected representation of PAMs in transformed cells. Representation of all PAMs found in control strains showed the actual representation. Representation of all PAMs in test strain showed which PAMs are not recognized by the enzyme and comparison to the control strain allows extracting the sequence of the depleted PAM.

[0205] In some embodiments of CRISPR-Cas9 systems, the degree of complementarity between the tracrRNA sequence and crRNA sequence is along the length of the shorter of the two when optimally aligned. As described herein, in embodiments of the present invention, the tracrRNA is not required. In some embodiments of previously described CRISPR-Cas systems (e.g. CRISPR-Cas9 systems), chimeric synthetic guide RNAs (sgRNAs) designs may incorporate at least 12 bp of duplex structure between the crRNA and tracrRNA, however in the Cpf1 CRISPR systems described herein such chimeric RNAs (chi-RNAs) are not possible as the system does not utilize a tracrRNA.

[0206] For minimization of toxicity and off-target effect, it will be important to control the concentration of nucleic acid-targeting guide RNA delivered. Optimal concentrations of nucleic acid-targeting guide RNA can be determined by testing different concentrations in a cellular or non-human eukaryote animal model and using deep sequencing the analyze the extent of modification at potential off-target genomic loci. The concentration that gives the highest level of on-target modification while minimizing the level of off-target modification should be chosen for in vivo delivery. The nucleic acid-targeting system is derived advantageously from a Type V/Type VI CRISPR system. In some embodiments, one or more elements of a nucleic acid-targeting system is derived from a particular organism comprising an endogenous RNA-targeting system. In preferred embodiments of the invention, the RNA-targeting system is a Type V/Type VI CRISPR system. In particular embodiments, the Type V/Type VI RNA-targeting Cas enzyme is Cpf1/C2c1/C2c2. Non-limiting examples of Cas proteins include Cas1, Cas1B, Cas2, Cas3, Cas4, Cas5, Cas6, Cas7, Cas8, Cas9 (also known as Csn1 and Csx12), Cas10, Csy1, Csy2, Csy3, Cse1, Cse2, Csc1, Csc2, Csa5, Csn2, Csm2, Csm3, Csm4, Csm5, Csm6, Cmr1, Cmr3, Cmr4, Cmr5, Cmr6, Csb1, Csb2, Csb3, Csx17, Csx14, Csx10, Csx16, CsaX, Csx3, Csx1, Csx15, Csf1, Csf2, Csf3, Csf4, homologues thereof, or modified versions thereof. In embodiments, the Type V/Type VI protein such as Cpf1/C2c1/C2c2 as referred to herein also encompasses a homologue or an orthologue of a Type V/Type VI protein such as Cpf1/C2c1/C2c2. The terms “orthologue” (also referred to as “ortholog” herein) and “homologue” (also referred to as “homolog” herein) are well known in the art. By means of further guidance, a “homologue” of a protein as used herein is a protein of the same species which performs the same or a similar function as the protein it is a homologue of. Homologous proteins may but need not be structurally related, or are only partially structurally related. An “orthologue” of a protein as used herein is a protein of a different species which performs the same or a similar function as the protein it is an orthologue of Orthologous proteins may but need not be structurally related, or are only partially structurally related. Homologs and orthologs may be identified by homology modelling (see, e.g., Greer, Science vol. 228 (1985) 1055, and Blundell et al. Eur J Biochem vol 172 (1988), 513) or “structural BLAST” (Dey F, Cliff Zhang Q, Petrey D, Honig B. Toward a “structural BLAST”: using structural relationships to infer function. Protein Sci. 2013 April; 22(4):359-66. doi: 10.1002/pro.2225.). See also Shmakov et al. (2015) for application in the field of CRISPR-Cas loci. Homologous proteins may but need not be structurally related, or are only partially structurally related. In particular embodiments, the homologue or orthologue of Cpf1 as referred to herein has a sequence homology or identity of at least 80%, more preferably at least 85%, even more preferably at least 90%, such as for instance at least 95% with Cpf1. In further embodiments, the homologue or orthologue of Cpf1 as referred to herein has a sequence identity of at least 80%, more preferably at least 85%, even more preferably at least 90%, such as for instance at least 95% with the wild type Cpf1. Where the Cpf1 has one or more mutations (mutated), the homologue or orthologue of said Cpf1 as referred to herein has a sequence identity of at least 80%, more preferably at least 85%, even more preferably at least 90%, such as for instance at least 95% with the mutated Cpf1.

[0207] In particular embodiments, the homologue or orthologue of a Type V/Type VI protein such as Cpf1/C2c1/C2c2 as referred to herein has a sequence homology or identity of at least 80%, more preferably at least 85%, even more preferably at least 90%, such as for instance at least 95% with a Type V/Type VI protein such as Cpf1/C2c1/C2c2. In further embodiments, the homologue or orthologue of a Type V/Type VI protein such as Cpf1/C2c1/C2c2 as referred to herein has a sequence identity of at least 80%, more preferably at least 85%, even more preferably at least 90%, such as for instance at least 95% with the wild type Type V/Type VI protein such as Cpf1/C2c1/C2c2.

[0208] In an embodiment, the Type V/Type VI RNA-targeting Cas protein may be a Cpf1/C2c1/C2c2 ortholog of an organism of a genus which includes but is not limited to Corynebacter, Sutterella, Legionella, Treponema, Filifactor, Eubacterium, Streptococcus, Lactobacillus, Mycoplasma, Bacteroides, Flaviivola, Flavobacterium, Sphaerochaeta, Azospirillum, Gluconacetobacter, Neisseria, Roseburia, Parvibaculum, Staphylococcus, Nitratifractor, Mycoplasma and Campylobacter. Species of organism of such a genus can be as otherwise herein discussed.

[0209] Some methods of identifying orthologs of CRISPR-Cas system enzymes may involve identifying tracr sequences in genomes of interest. Identification of tracr sequences may relate to the following steps: Search for the direct repeats or tracr mate sequences in a database to identify a CRISPR region comprising a CRISPR enzyme. Search for homologous sequences in the CRISPR region flanking the CRISPR enzyme in both the sense and antisense directions. Look for transcriptional terminators and secondary structures. Identify any sequence that is not a direct repeat or a tracr mate sequence but has more than 50% identity to the direct repeat or tracr mate sequence as a potential tracr sequence. Take the potential tracr sequence and analyze for transcriptional terminator sequences associated therewith. In this system, RNA-sequencing data revealed that the potential tracrRNAs identified computationally were only lowly expressed suggesting possibility that tracrRNA may not be necessary for function of the present system. After further evaluation of the FnCpf1 locus and addition of in vitro cleavage results, Applicants concluded that target DNA cleavage by a Cpf1 effector protein complex does not require a tracrRNA. Applicants determined that Cpf1 effector protein complexes comprising only a Cpf1 effector protein and a crRNA (guide RNA comprising a direct repeat sequence and a guide sequence) were sufficient to cleave target DNA.

[0210] It will be appreciated that any of the functionalities described herein may be engineered into CRISPR enzymes from other orthologs, including chimeric enzymes comprising fragments from multiple orthologs. Examples of such orthologs are described elsewhere herein. Thus, chimeric enzymes may comprise fragments of CRISPR enzyme orthologs of organisms of a genus which includes but is not limited to Corynebacter, Sutterella, Legionella, Treponema, Filifactor, Eubacterium, Streptococcus, Lactobacillus, Mycoplasma, Bacteroides, Flaviivola, Flavobacterium, Sphaerochaeta, Azospirillum, Gluconacetobacter, Neisseria, Roseburia, Parvibaculum, Staphylococcus, Nitratifractor, Mycoplasma and Campylobacter. A chimeric enzyme can comprise a first fragment and a second fragment, and the fragments can be of CRISPR enzyme orthologs of organisms of genuses herein mentioned or of species herein mentioned; advantageously the fragments are from CRISPR enzyme orthologs of different species.

[0211] In embodiments, the Type V/Type VI RNA-targeting effector protein, in particular the Cpf1/C2c1/C2c2 protein as referred to herein also encompasses a functional variant of Cpf1/C2c1/C2c2 or a homologue or an orthologue thereof. A “functional variant” of a protein as used herein refers to a variant of such protein which retains at least partially the activity of that protein. Functional variants may include mutants (which may be insertion, deletion, or replacement mutants), including polymorphs, etc. Also included within functional variants are fusion products of such protein with another, usually unrelated, nucleic acid, protein, polypeptide or peptide. Functional variants may be naturally occurring or may be man-made. Advantageous embodiments can involve engineered or non-naturally occurring Type V/Type VI RNA-targeting effector protein, e.g., Cpf1/C2c1/C2c2 or an ortholog or homolog thereof.

[0212] In an embodiment, nucleic acid molecule(s) encoding the Type V/Type VI RNA-targeting effector protein, in particular Cpf1/C2c1/C2c2 or an ortholog or homolog thereof, may be codon-optimized for expression in an eukaryotic cell. A eukaryote can be as herein discussed. Nucleic acid molecule(s) can be engineered or non-naturally occurring.

[0213] In an embodiment, the Type V/Type VI RNA-targeting effector protein, in particular Cpf1/C2c1/C2c2 or an ortholog or homolog thereof, may comprise one or more mutations (and hence nucleic acid molecule(s) coding for same may have mutation(s)). The mutations may be artificially introduced mutations and may include but are not limited to one or more mutations in a catalytic domain. Examples of catalytic domains with reference to a Cas9 enzyme may include but are not limited to RuvC I, RuvC II, RuvC III and HNH domains.

[0214] In an embodiment, the Type V/Type VI protein such as Cpf1/C2c1/C2c2 or an ortholog or homolog thereof, may be used as a generic nucleic acid binding protein with fusion to or being operably linked to a functional domain. Exemplary functional domains may include but are not limited to translational initiator, translational activator, translational repressor, nucleases, in particular ribonucleases, a spliceosome, beads, a light inducible/controllable domain or a chemically inducible/controllable domain.

[0215] In some embodiments, the unmodified nucleic acid-targeting effector protein may have cleavage activity. In some embodiments, the RNA-targeting effector protein may direct cleavage of one or both nucleic acid (DNA or RNA) strands at the location of or near a target sequence, such as within the target sequence and/or within the complement of the target sequence or at sequences associated with the target sequence. In some embodiments, the nucleic acid-targeting effector protein may direct cleavage of one or both DNA or RNA strands within about 1, 2, 3, 4, 5, 6, 7, 8, 9, 10, 15, 20, 25, 50, 100, 200, 500, or more base pairs from the first or last nucleotide of a target sequence. In some embodiments, the cleavage may be staggered, i.e. generating sticky ends. In some embodiments, the cleavage is a staggered cut with a 5′ overhang. In some embodiments, the cleavage is a staggered cut with a 5′ overhang of 1 to 5 nucleotides, preferably of 4 or 5 nucleotides. In some embodiments, the cleavage site is distant from the PAM, e.g., the cleavage occurs after the 18^{th} nucleotide on the non-target strand and after the 23^{rd} nucleotide on the targeted strand (FIG. 97A). In some embodiments, the cleavage site occurs after the 18^{th} nucleotide (counted from the PAM) on the non-target strand and after the 23^{rd} nucleotide (counted from the PAM) on the targeted strand (FIG. 97A). In some embodiments, a vector encodes a nucleic acid-targeting effector protein that may be mutated with respect to a corresponding wild-type enzyme such that the mutated nucleic acid-targeting effector protein lacks the ability to cleave one or both DNA or RNA strands of a target polynucleotide containing a target sequence. As a further example, two or more catalytic domains of a Cas protein (e.g. RuvC I, RuvC II, and RuvC III or the HNH domain of a Cas9 protein) may be mutated to produce a mutated Cas protein substantially lacking all DNA cleavage activity. As described herein, corresponding catalytic domains of a Cpf1 effector protein may also be mutated to produce a mutated Cpf1 effector protein lacking all DNA cleavage activity or having substantially reduced DNA cleavage activity. In some embodiments, a nucleic acid-targeting effector protein may be considered to substantially lack all RNA cleavage activity when the RNA cleavage activity of the mutated enzyme is about no more than 25%, 10%, 5%, 1%, 0.1%, 0.01%, or less of the nucleic acid cleavage activity of the non-mutated form of the enzyme; an example can be when the nucleic acid cleavage activity of the mutated form is nil or negligible as compared with the non-mutated form. An effector protein may be identified with reference to the general class of enzymes that share homology to the biggest nuclease with multiple nuclease domains from the Type V/Type VI CRISPR system. Most preferably, the effector protein is a Type V/Type VI protein such as Cpf1/C2c1/C2c2. In further embodiments, the effector protein is a Type V protein. By derived, Applicants mean that the derived enzyme is largely based, in the sense of having a high degree of sequence homology with, a wildtype enzyme, but that it has been mutated (modified) in some way as known in the art or as described herein.

[0216] Again, it will be appreciated that the terms Cas and CRISPR enzyme and CRISPR protein and Cas protein are generally used interchangeably and at all points of reference herein refer by analogy to novel CRISPR effector proteins further described in this application, unless otherwise apparent, such as by specific reference to Cas9. As mentioned above, many of the residue numberings used herein refer to the effector protein from the Type V/Type VI CRISPR locus. However, it will be appreciated that this invention includes many more effector proteins from other species of microbes. In certain embodiments, effector proteins may be constitutively present or inducibly present or conditionally present or administered or delivered. Effector protein optimization may be used to enhance function or to develop new functions, one can generate chimeric effector proteins. And as described herein effector proteins may be modified to be used as a generic nucleic acid binding proteins.

[0217] Typically, in the context of a nucleic acid-targeting system, formation of a nucleic acid-targeting complex (comprising a guide RNA hybridized to a target sequence and complexed with one or more nucleic acid-targeting effector proteins) results in cleavage of one or both DNA or RNA strands in or near (e.g., within 1, 2, 3, 4, 5, 6, 7, 8, 9, 10, 20, 50, or more base pairs from) the target sequence. As used herein the term “sequence(s) associated with a target locus of interest” refers to sequences near the vicinity of the target sequence (e.g. within 1, 2, 3, 4, 5, 6, 7, 8, 9, 10, 20, 50, or more base pairs from the target sequence, wherein the target sequence is comprised within a target locus of interest).

[0218] An example of a codon optimized sequence, is in this instance a sequence optimized for expression in a eukaryote, e.g., humans (i.e. being optimized for expression in humans), or for another eukaryote, animal or mammal as herein discussed; see, e.g., SaCas9 human codon optimized sequence in WO 2014/093622 (PCT/US2013/074667) as an example of a codon optimized sequence (from knowledge in the art and this disclosure, codon optimizing coding nucleic acid molecule(s), especially as to effector protein (e.g., Cpf1) is within the ambit of the skilled artisan). Whilst this is preferred, it will be appreciated that other examples are possible and codon optimization for a host species other than human, or for codon optimization for specific organs is known. In some embodiments, an enzyme coding sequence encoding a DNA/RNA-targeting Cas protein is codon optimized for expression in particular cells, such as eukaryotic cells. The eukaryotic cells may be those of or derived from a particular organism, such as a plant or a mammal, including but not limited to human, or non-human eukaryote or animal or mammal as herein discussed, e.g., mouse, rat, rabbit, dog, livestock, or non-human mammal or primate. In some embodiments, processes for modifying the germ line genetic identity of human beings and/or processes for modifying the genetic identity of animals which are likely to cause them suffering without any substantial medical benefit to man or animal, and also animals resulting from such processes, may be excluded. In general, codon optimization refers to a process of modifying a nucleic acid sequence for enhanced expression in the host cells of interest by replacing at least one codon (e.g., about or more than about 1, 2, 3, 4, 5, 10, 15, 20, 25, 50, or more codons) of the native sequence with codons that are more frequently or most frequently used in the genes of that host cell while maintaining the native amino acid sequence. Various species exhibit particular bias for certain codons of a particular amino acid. Codon bias (differences in codon usage between organisms) often correlates with the efficiency of translation of messenger RNA (mRNA), which is in turn believed to be dependent on, among other things, the properties of the codons being translated and the availability of particular transfer RNA (tRNA) molecules. The predominance of selected tRNAs in a cell is generally a reflection of the codons used most frequently in peptide synthesis. Accordingly, genes can be tailored for optimal gene expression in a given organism based on codon optimization. Codon usage tables are readily available, for example, at the “Codon Usage Database” available at www.kazusa.orjp/codon/and these tables can be adapted in a number of ways. See Nakamura, Y., et al. “Codon usage tabulated from the international DNA sequence databases: status for the year 2000” Nucl. Acids Res. 28:292 (2000). Computer algorithms for codon optimizing a particular sequence for expression in a particular host cell are also available, such as Gene Forge (Aptagen; Jacobus, P A), are also available. In some embodiments, one or more codons (e.g., 1, 2, 3, 4, 5, 10, 15, 20, 25, 50, or more, or all codons) in a sequence encoding a DNA/RNA-targeting Cas protein corresponds to the most frequently used codon for a particular amino acid. As to codon usage in yeast, reference is made to the online Yeast Genome database available at http://www.yeastgenome.org/community/codon_usage.shtml, or Codon selection in yeast, Bennetzen and Hall, J Biol Chem. 1982 Mar. 25; 257(6):3026-31. As to codon usage in plants including algae, reference is made to Codon usage in higher plants, green algae, and cyanobacteria, Campbell and Gowri, Plant Physiol. 1990 January; 92(1): 1-11; as well as Codon usage in plant genes, Murray et al, Nucleic Acids Res. 1989 Jan. 25; 17(2):477-98; or Selection on the codon bias of chloroplast and cyanelle genes in different plant and algal lineages, Morton B R, J Mol Evol. 1998 April; 46(4):449-59.

[0219] In some embodiments, a vector encodes a nucleic acid-targeting effector protein such as the Type V/Type VI RNA-targeting effector protein, in particular Cpf1/C2c1/C2c2 or an ortholog or homolog thereof comprising one or more nuclear localization sequences (NLSs), such as about or more than about 1, 2, 3, 4, 5, 6, 7, 8, 9, 10, or more NLSs. In some embodiments, the RNA-targeting effector protein comprises about or more than about 1, 2, 3, 4, 5, 6, 7, 8, 9, 10, or more NLSs at or near the amino-terminus, about or more than about 1, 2, 3, 4, 5, 6, 7, 8, 9, 10, or more NLSs at or near the carboxy-terminus, or a combination of these (e.g., zero or at least one or more NLS at the amino-terminus and zero or at one or more NLS at the carboxy terminus). When more than one NLS is present, each may be selected independently of the others, such that a single NLS may be present in more than one copy and/or in combination with one or more other NLSs present in one or more copies. In some embodiments, an NLS is considered near the N- or C-terminus when the nearest amino acid of the NLS is within about 1, 2, 3, 4, 5, 10, 15, 20, 25, 30, 40, 50, or more amino acids along the polypeptide chain from the N- or C-terminus. Non-limiting examples of NLSs include an NLS sequence derived from: the NLS of the SV40 virus large T-antigen, having the amino acid sequence PKKKRKV (SEQ ID NO: 2); the NLS from nucleoplasmin (e.g., the nucleoplasmin bipartite NLS with the sequence KRPAATKKAGQAKKKK (SEQ ID NO: 3)); the c-myc NLS having the amino acid sequence PAAKRVKLD (SEQ ID NO: 4) or RQRRNELKRSP (SEQ ID NO: 5); the hRNPA1 M9 NLS having the sequence NQSSNFGPMKGGNFGGRSSGPYGGGGQYFAKPRNQGGY (SEQ ID NO: 6); the sequence RMRIZFKNKGKDTAELRRRRVEVSVELRKAKKDEQILKRRNV (SEQ ID NO: 7) of the IBB domain from importin-alpha; the sequences VSRKRPRP (SEQ ID NO: 8) and PPKKARED (SEQ ID NO: 9) of the myoma T protein; the sequence PQPKKKPL (SEQ ID NO: 10) of human p53; the sequence SALIKKKKKMAP (SEQ ID NO: 11) of mouse c-abl IV; the sequences DRLRR (SEQ ID NO: 12) and PKQKKRK (SEQ ID NO: 13) of the influenza virus NS1; the sequence RKLKKKIKKL (SEQ ID NO: 14) of the Hepatitis virus delta antigen; the sequence REKKKFLKRR (SEQ ID NO: 15) of the mouse Mx1 protein; the sequence KRKGDEVDGVDEVAKKKSKK (SEQ ID NO: 16) of the human poly(ADP-ribose) polymerase; and the sequence RKCLQAGMNLEARKTKK (SEQ ID NO: 17) of the steroid hormone receptors (human) glucocorticoid. In general, the one or more NLSs are of sufficient strength to drive accumulation of the DNA/RNA-targeting Cas protein in a detectable amount in the nucleus of a eukaryotic cell. In general, strength of nuclear localization activity may derive from the number of NLSs in the nucleic acid-targeting effector protein, the particular NLS(s) used, or a combination of these factors. Detection of accumulation in the nucleus may be performed by any suitable technique. For example, a detectable marker may be fused to the nucleic acid-targeting protein, such that location within a cell may be visualized, such as in combination with a means for detecting the location of the nucleus (e.g., a stain specific for the nucleus such as DAPI). Cell nuclei may also be isolated from cells, the contents of which may then be analyzed by any suitable process for detecting protein, such as immunohistochemistry, Western blot, or enzyme activity assay. Accumulation in the nucleus may also be determined indirectly, such as by an assay for the effect of nucleic acid-targeting complex formation (e.g., assay for DNA or RNA cleavage or mutation at the target sequence, or assay for altered gene expression activity affected by DNA or RNA-targeting complex formation and/or DNA or RNA-targeting Cas protein activity), as compared to a control not exposed to the nucleic acid-targeting Cas protein or nucleic acid-targeting complex, or exposed to a nucleic acid-targeting Cas protein lacking the one or more NLSs. In preferred embodiments of the herein described Cpf1 effector protein complexes and systems the codon optimized Cpf1 effector proteins comprise an NLS attached to the C-terminal of the protein.

[0220] In some embodiments, one or more vectors driving expression of one or more elements of a nucleic acid-targeting system are introduced into a host cell such that expression of the elements of the nucleic acid-targeting system direct formation of a nucleic acid-targeting complex at one or more target sites. For example, a nucleic acid-targeting effector enzyme and a nucleic acid-targeting guide RNA could each be operably linked to separate regulatory elements on separate vectors. RNA(s) of the nucleic acid-targeting system can be delivered to a transgenic nucleic acid-targeting effector protein animal or mammal, e.g., an animal or mammal that constitutively or inducibly or conditionally expresses nucleic acid-targeting effector protein; or an animal or mammal that is otherwise expressing nucleic acid-targeting effector proteins or has cells containing nucleic acid-targeting effector proteins, such as by way of prior administration thereto of a vector or vectors that code for and express in vivo nucleic acid-targeting effector proteins. Alternatively, two or more of the elements expressed from the same or different regulatory elements, may be combined in a single vector, with one or more additional vectors providing any components of the nucleic acid-targeting system not included in the first vector. nucleic acid-targeting system elements that are combined in a single vector may be arranged in any suitable orientation, such as one element located 5′ with respect to (“upstream” of) or 3′ with respect to (“downstream” of) a second element. The coding sequence of one element may be located on the same or opposite strand of the coding sequence of a second element, and oriented in the same or opposite direction. In some embodiments, a single promoter drives expression of a transcript encoding a nucleic acid-targeting effector protein and the nucleic acid-targeting guide RNA, embedded within one or more intron sequences (e.g., each in a different intron, two or more in at least one intron, or all in a single intron). In some embodiments, the nucleic acid-targeting effector protein and the nucleic acid-targeting guide RNA may be operably linked to and expressed from the same promoter. Delivery vehicles, vectors, particles, nanoparticles, formulations and components thereof for expression of one or more elements of a nucleic acid-targeting system are as used in the foregoing documents, such as WO 2014/093622 (PCT/US2013/074667). In some embodiments, a vector comprises one or more insertion sites, such as a restriction endonuclease recognition sequence (also referred to as a “cloning site”). In some embodiments, one or more insertion sites (e.g., about or more than about 1, 2, 3, 4, 5, 6, 7, 8, 9, 10, or more insertion sites) are located upstream and/or downstream of one or more sequence elements of one or more vectors. When multiple different guide sequences are used, a single expression construct may be used to target nucleic acid-targeting activity to multiple different, corresponding target sequences within a cell. For example, a single vector may comprise about or more than about 1, 2, 3, 4, 5, 6, 7, 8, 9, 10, 15, 20, or more guide sequences. In some embodiments, about or more than about 1, 2, 3, 4, 5, 6, 7, 8, 9, 10, or more such guide-sequence-containing vectors may be provided, and optionally delivered to a cell. In some embodiments, a vector comprises a regulatory element operably linked to an enzyme-coding sequence encoding a nucleic acid-targeting effector protein. Nucleic acid-targeting effector protein or nucleic acid-targeting guide RNA or RNA(s) can be delivered separately; and advantageously at least one of these is delivered via a particle complex. nucleic acid-targeting effector protein mRNA can be delivered prior to the nucleic acid-targeting guide RNA to give time for nucleic acid-targeting effector protein to be expressed. Nucleic acid-targeting effector protein mRNA might be administered 1-12 hours (preferably around 2-6 hours) prior to the administration of nucleic acid-targeting guide RNA. Alternatively, nucleic acid-targeting effector protein mRNA and nucleic acid-targeting guide RNA can be administered together. Advantageously, a second booster dose of guide RNA can be administered 1-12 hours (preferably around 2-6 hours) after the initial administration of nucleic acid-targeting effector protein mRNA+guide RNA. Additional administrations of nucleic acid-targeting effector protein mRNA and/or guide RNA might be useful to achieve the most efficient levels of genome modification.

[0221] In one aspect, the invention provides methods for using one or more elements of a nucleic acid-targeting system. The nucleic acid-targeting complex of the invention provides an effective means for modifying a target DNA or RNA (single or double stranded, linear or super-coiled). The nucleic acid-targeting complex of the invention has a wide variety of utility including modifying (e.g., deleting, inserting, translocating, inactivating, activating) a target DNA or RNA in a multiplicity of cell types. As such the nucleic acid-targeting complex of the invention has a broad spectrum of applications in, e.g., gene therapy, drug screening, disease diagnosis, and prognosis. An exemplary nucleic acid-targeting complex comprises a DNA or RNA-targeting effector protein complexed with a guide RNA hybridized to a target sequence within the target locus of interest.

[0222] In one embodiment, this invention provides a method of cleaving a target RNA. The method may comprise modifying a target RNA using a nucleic acid-targeting complex that binds to the target RNA and effect cleavage of said target RNA. In an embodiment, the nucleic acid-targeting complex of the invention, when introduced into a cell, may create a break (e.g., a single or a double strand break) in the RNA sequence. For example, the method can be used to cleave a disease RNA in a cell. For example, an exogenous RNA template comprising a sequence to be integrated flanked by an upstream sequence and a downstream sequence may be introduced into a cell. The upstream and downstream sequences share sequence similarity with either side of the site of integration in the RNA. Where desired, a donor RNA can be mRNA. The exogenous RNA template comprises a sequence to be integrated (e.g., a mutated RNA). The sequence for integration may be a sequence endogenous or exogenous to the cell. Examples of a sequence to be integrated include RNA encoding a protein or a non-coding RNA (e.g., a microRNA). Thus, the sequence for integration may be operably linked to an appropriate control sequence or sequences. Alternatively, the sequence to be integrated may provide a regulatory function. The upstream and downstream sequences in the exogenous RNA template are selected to promote recombination between the RNA sequence of interest and the donor RNA. The upstream sequence is a RNA sequence that shares sequence similarity with the RNA sequence upstream of the targeted site for integration. Similarly, the downstream sequence is a RNA sequence that shares sequence similarity with the RNA sequence downstream of the targeted site of integration. The upstream and downstream sequences in the exogenous RNA template can have 75%, 80%, 85%, 90%, 95%, or 100% sequence identity with the targeted RNA sequence. Preferably, the upstream and downstream sequences in the exogenous RNA template have about 95%, 96%, 97%, 98%, 99%, or 100% sequence identity with the targeted RNA sequence. In some methods, the upstream and downstream sequences in the exogenous RNA template have about 99% or 100% sequence identity with the targeted RNA sequence. An upstream or downstream sequence may comprise from about 20 bp to about 2500 bp, for example, about 50, 100, 200, 300, 400, 500, 600, 700, 800, 900, 1000, 1100, 1200, 1300, 1400, 1500, 1600, 1700, 1800, 1900, 2000, 2100, 2200, 2300, 2400, or 2500 bp. In some methods, the exemplary upstream or downstream sequence have about 200 bp to about 2000 bp, about 600 bp to about 1000 bp, or more particularly about 700 bp to about 1000 bp. In some methods, the exogenous RNA template may further comprise a marker. Such a marker may make it easy to screen for targeted integrations. Examples of suitable markers include restriction sites, fluorescent proteins, or selectable markers. The exogenous RNA template of the invention can be constructed using recombinant techniques (see, for example, Sambrook et al., 2001 and Ausubel et al., 1996). In a method for modifying a target RNA by integrating an exogenous RNA template, a break (e.g., double or single stranded break in double or single stranded DNA or RNA) is introduced into the DNA or RNA sequence by the nucleic acid-targeting complex, the break is repaired via homologous recombination with an exogenous RNA template such that the template is integrated into the RNA target. The presence of a double-stranded break facilitates integration of the template. In other embodiments, this invention provides a method of modifying expression of a RNA in a eukaryotic cell. The method comprises increasing or decreasing expression of a target polynucleotide by using a nucleic acid-targeting complex that binds to the DNA or RNA (e.g., mRNA or pre-mRNA). In some methods, a target RNA can be inactivated to effect the modification of the expression in a cell. For example, upon the binding of a RNA-targeting complex to a target sequence in a cell, the target RNA is inactivated such that the sequence is not translated, the coded protein is not produced, or the sequence does not function as the wild-type sequence does. For example, a protein or microRNA coding sequence may be inactivated such that the protein or microRNA or pre-microRNA transcript is not produced. The target RNA of a RNA-targeting complex can be any RNA endogenous or exogenous to the eukaryotic cell. For example, the target RNA can be a RNA residing in the nucleus of the eukaryotic cell. The target RNA can be a sequence (e.g., mRNA or pre-mRNA) coding a gene product (e.g., a protein) or a non-coding sequence (e.g., ncRNA, lncRNA, tRNA, or rRNA). Examples of target RNA include a sequence associated with a signaling biochemical pathway, e.g., a signaling biochemical pathway-associated RNA. Examples of target RNA include a disease associated RNA. A “disease-associated” RNA refers to any RNA which is yielding translation products at an abnormal level or in an abnormal form in cells derived from a disease-affected tissues compared with tissues or cells of a non disease control. It may be a RNA transcribed from a gene that becomes expressed at an abnormally high level; it may be a RNA transcribed from a gene that becomes expressed at an abnormally low level, where the altered expression correlates with the occurrence and/or progression of the disease. A disease-associated RNA also refers to a RNA transcribed from a gene possessing mutation(s) or genetic variation that is directly responsible or is in linkage disequilibrium with a gene(s) that is responsible for the etiology of a disease. The translated products may be known or unknown, and may be at a normal or abnormal level. The target RNA of a RNA-targeting complex can be any RNA endogenous or exogenous to the eukaryotic cell. For example, the target RNA can be a RNA residing in the nucleus of the eukaryotic cell. The target RNA can be a sequence (e.g., mRNA or pre-mRNA) coding a gene product (e.g., a protein) or a non-coding sequence (e.g., ncRNA, lncRNA, tRNA, or rRNA).

[0223] In some embodiments, the method may comprise allowing a nucleic acid-targeting complex to bind to the target DNA or RNA to effect cleavage of said target DNA or RNA thereby modifying the target DNA or RNA, wherein the nucleic acid-targeting complex comprises a nucleic acid-targeting effector protein complexed with a guide RNA hybridized to a target sequence within said target DNA or RNA. In one aspect, the invention provides a method of modifying expression of DNA or RNA in a eukaryotic cell. In some embodiments, the method comprises allowing a nucleic acid-targeting complex to bind to the DNA or RNA such that said binding results in increased or decreased expression of said DNA or RNA; wherein the nucleic acid-targeting complex comprises a nucleic acid-targeting effector protein complexed with a guide RNA. Similar considerations and conditions apply as above for methods of modifying a target DNA or RNA. In fact, these sampling, culturing and re-introduction options apply across the aspects of the present invention. In one aspect, the invention provides for methods of modifying a target DNA or RNA in a eukaryotic cell, which may be in vivo, ex vivo or in vitro. In some embodiments, the method comprises sampling a cell or population of cells from a human or non-human animal, and modifying the cell or cells. Culturing may occur at any stage ex vivo. The cell or cells may even be re-introduced into the non-human animal or plant. For re-introduced cells it is particularly preferred that the cells are stem cells.

[0224] Indeed, in any aspect of the invention, the nucleic acid-targeting complex may comprise a nucleic acid-targeting effector protein complexed with a guide RNA hybridized to a target sequence.

[0225] The invention relates to the engineering and optimization of systems, methods and compositions used for the control of gene expression involving DNA or RNA sequence targeting, that relate to the nucleic acid-targeting system and components thereof. In advantageous embodiments, the effector enzyme is a Type V/Type VI protein such as Cpf1/C2c1/C2c2. An advantage of the present methods is that the CRISPR system minimizes or avoids off-target binding and its resulting side effects. This is achieved using systems arranged to have a high degree of sequence specificity for the target DNA or RNA.

[0226] In relation to a nucleic acid-targeting complex or system preferably, the crRNA sequence has one or more stem loops or hairpins and is 30 or more nucleotides in length, 40 or more nucleotides in length, or 50 or more nucleotides in length; the crRNA sequence is between 10 to 30 nucleotides in length, the nucleic acid-targeting effector protein is a Type V/Type VI Cas enzyme. In certain embodiments, the crRNA sequence is between 42 and 44 nucleotides in length, and the nucleic acid-targeting Cas protein is Cpf1 of Francisella tularensis subsp. novocida U112. In certain embodiments, the crRNA comprises, consists essentially of, or consists of 19 nucleotides of a direct repeat and between 23 and 25 nucleotides of spacer sequence, and the nucleic acid-targeting Cas protein is Cpf1 of Francisella tularensis subsp. novocida U112.

[0227] The use of two different aptamers (each associated with a distinct nucleic acid-targeting guide RNAs) allows an activator-adaptor protein fusion and a repressor-adaptor protein fusion to be used, with different nucleic acid-targeting guide RNAs, to activate expression of one DNA or RNA, whilst repressing another. They, along with their different guide RNAs can be administered together, or substantially together, in a multiplexed approach. A large number of such modified nucleic acid-targeting guide RNAs can be used all at the same time, for example 10 or 20 or 30 and so forth, whilst only one (or at least a minimal number) of effector protein molecules need to be delivered, as a comparatively small number of effector protein molecules can be used with a large number modified guides. The adaptor protein may be associated (preferably linked or fused to) one or more activators or one or more repressors. For example, the adaptor protein may be associated with a first activator and a second activator. The first and second activators may be the same, but they are preferably different activators. Three or more or even four or more activators (or repressors) may be used, but package size may limit the number being higher than 5 different functional domains. Linkers are preferably used, over a direct fusion to the adaptor protein, where two or more functional domains are associated with the adaptor protein. Suitable linkers might include the GlySer linker.

[0228] It is also envisaged that the nucleic acid-targeting effector protein-guide RNA complex as a whole may be associated with two or more functional domains. For example, there may be two or more functional domains associated with the nucleic acid-targeting effector protein, or there may be two or more functional domains associated with the guide RNA (via one or more adaptor proteins), or there may be one or more functional domains associated with the nucleic acid-targeting effector protein and one or more functional domains associated with the guide RNA (via one or more adaptor proteins).

[0229] The fusion between the adaptor protein and the activator or repressor may include a linker. For example, GlySer linkers GGGS (SEQ ID NO: 18) can be used. They can be used in repeats of 3 ((GGGGS)₃ (SEQ ID NO: 19)) or 6 (SEQ ID NO: 20), 9 (SEQ ID NO: 21) or even 12 (SEQ ID NO: 22) or more, to provide suitable lengths, as required. Linkers can be used between the guide RNAs and the functional domain (activator or repressor), or between the nucleic acid-targeting Cas protein (Cas) and the functional domain (activator or repressor). The linkers the user to engineer appropriate amounts of “mechanical flexibility”.

[0230] The invention comprehends a nucleic acid-targeting complex comprising a nucleic acid-targeting effector protein and a guide RNA, wherein the nucleic acid-targeting effector protein comprises at least one mutation, such that the nucleic acid-targeting effector protein has no more than 5% of the activity of the nucleic acid-targeting effector protein not having the at least one mutation and, optional, at least one or more nuclear localization sequences; the guide RNA comprises a guide sequence capable of hybridizing to a target sequence in a RNA of interest in a cell; and wherein: the nucleic acid-targeting effector protein is associated with two or more functional domains; or at least one loop of the guide RNA is modified by the insertion of distinct RNA sequence(s) that bind to one or more adaptor proteins, and wherein the adaptor protein is associated with two or more functional domains; or the nucleic acid-targeting Cas protein is associated with one or more functional domains and at least one loop of the guide RNA is modified by the insertion of distinct RNA sequence(s) that bind to one or more adaptor proteins, and wherein the adaptor protein is associated with one or more functional domains.

### Modified Cpf1 Enzymes

[0231] Computational analysis of the primary structure of Cpf1 nucleases reveals three distinct regions (FIG. 1). First a C-terminal RuvC like domain, which is the only functional characterized domain. Second a N-terminal alpha-helical region and thirst a mixed alpha and beta region, located between the RuvC like domain and the alpha-helical region.

[0232] Several small stretches of unstructured regions are predicted within the Cpf1 primary structure. Unstructured regions, which are exposed to the solvent and not conserved within different Cpf1 orthologs, are preferred sides for splits and insertions of small protein sequences (FIGS. 2 and 3). In addition, these sides can be used to generate chimeric proteins between Cpf1 orthologs.

[0233] Based on the above information, mutants can be generated which lead to inactivation of the enzyme or which modify the double strand nuclease to nickase activity. In alternative embodiments, this information is used to develop enzymes with reduced off-target effects (described elsewhere herein)

[0234] In certain of the above-described Cpf1 enzymes, the enzyme is modified by mutation of one or more residues including but not limited to positions D917, E1006, E1028, D1227, D1255A, N1257, according to FnCpf1 protein or any corresponding ortholog. In an aspect the invention provides a herein-discussed composition wherein the Cpf1 enzyme is an inactivated enzyme which comprises one or more mutations selected from the group consisting of D917A, E1006A, E1028A, D1227A, D1255A, N1257A, D917A, E1006A, E1028A, D1227A, D1255A and N1257A according to FnCpf1 protein or corresponding positions in a Cpf1 ortholog. In an aspect the invention provides a herein-discussed composition, wherein the CRISPR enzyme comprises D917, or E1006 and D917, or D917 and D1255, according to FnCpf1 protein or a corresponding position in a Cpf1 ortholog.

[0235] In certain of the above-described Cpf1 enzymes, the enzyme is modified by mutation of one or more residues (in the RuvC domain) including but not limited to positions R909, R912, R930, R947, K949, R951, R955, K965, K968, K1000, K1002, R1003, K1009, K1017, K1022, K1029, K1035, K1054, K1072, K1086, R1094, K1095, K1109, K1118, K1142, K1150, K1158, K1159, R1220, R1226, R1242, and/or R1252 with reference to amino acid position numbering of AsCpf1 (Acidaminococcus sp. BV3L6).

[0236] In certain of the above-described non-naturally-occurring CRISPR enzymes, the enzyme is modified by mutation of one or more residues (in the RAD50) domain including but not limited positions K324, K335, K337, R331, K369, K370, R386, R392, R393, K400, K404, K406, K408, K414, K429, K436, K438, K459, K460, K464, R670, K675, R681, K686, K689, R699, K705, R725, K729, K739, K748, and/or K752 with reference to amino acid position numbering of AsCpf1 (Acidaminococcus sp. BV3L6).

[0237] In certain of the Cpf1 enzymes, the enzyme is modified by mutation of one or more residues including but not limited positions R912, T923, R947, K949, R951, R955, K965, K968, K1000, R1003, K1009, K1017, K1022, K1029, K1072, K1086, F1103, R1226, and/or R1252 with reference to amino acid position numbering of AsCpf1 (Acidaminococcus sp. BV3L6).

[0238] In certain embodiments, the Cpf1 enzyme is modified by mutation of one or more residues including but not limited positions R833, R836, K847, K879, K881, R883, R887, K897, K900, K932, R935, K940, K948, K953, K960, K984, K1003, K1017, R1033, R1138, R1165, and/or R1252 with reference to amino acid position numbering of LbCpf1 (Lachnospiraceae bacterium ND2006).

[0239] In certain embodiments, the Cpf1 enzyme is modified by mutation of one or more residues including but not limited positions K15, R18, K26, Q34, R43, K48, K51, R56, R84, K85, K87, N93, R103, N104, T118, K123, K134, R176, K177, R192, K200, K226, K273, K275, T291, R301, K307, K369, S404, V409, K414, K436, K438, K468, D482, K516, R518, K524, K530, K532, K548, K559, K570, R574, K592, D596, K603, K607, K613, C647, R681, K686, H720, K739, K748, K757, T766, K780, R790, P791, K796, K809, K815, T816, K860, R862, R863, K868, K897, R909, R912, T923, R947, K949, R951, R955, K965, K968, K1000, R1003, K1009, K1017, K1022, K1029, A1053, K1072, K1086, F1103, S1209, R1226, R1252, K1273, K1282, and/or K1288 with reference to amino acid position numbering of AsCpf1 (Acidaminococcus sp. BV3L6).

[0240] In certain embodiments, the enzyme is modified by mutation of one or more residues including but not limited positions K15, R18, K26, R34, R43, K48, K51, K56, K87, K88, D90, K96, K106, K107, K120, Q125, K143, R186, K187, R202, K210, K235, K296, K298, K314, K320, K326, K397, K444, K449, E454, A483, E491, K527, K541, K581, R583, K589, K595, K597, K613, K624, K635, K639, K656, K660, K667, K671, K677, K719, K725, K730, K763, K782, K791, R800, K809, K823, R833, K834, K839, K852, K858, K859, K869, K871, R872, K877, K905, R918, R921, K932, I960, K962, R964, R968, K978, K981, K1013, R1016, K1021, K1029, K1034, K1041, K1065, K1084, and/or K1098 with reference to amino acid position numbering of FnCpf1 (Francisella novicida U112).

[0241] In certain embodiments, the enzyme is modified by mutation of one or more residues including but not limited positions K15, R18, K26, K34, R43, K48, K51, R56, K83, K84, R86, K92, R102, K103, K116, K121, R158, E159, R174, R182, K206, K251, K253, K269, K271, K278, P342, K380, R385, K390, K415, K421, K457, K471, A506, R508, K514, K520, K522, K538, Y548, K560, K564, K580, K584, K591, K595, K601, K634, K640, R645, K679, K689, K707, T716, K725, R737, R747, R748, K753, K768, K774, K775, K785, K787, R788, Q793, K821, R833, R836, K847, K879, K881, R883, R887, K897, K900, K932, R935, K940, K948, K953, K960, K984, K1003, K1017, R1033, K1121, R1138, R1165, K1190, K1199, and/or K1208 with reference to amino acid position numbering of LbCpf1 (Lachnospiraceae bacterium ND2006).

[0242] In certain embodiments, the enzyme is modified by mutation of one or more residues including but not limited positions K14, R17, R25, K33, M42, Q47, K50, D55, K85, N86, K88, K94, R104, K105, K118, K123, K131, R174, K175, R190, R198, I221, K267, Q269, K285, K291, K297, K357, K403, K409, K414, K448, K460, K501, K515, K550, R552, K558, K564, K566, K582, K593, K604, K608, K623, K627, K633, K637, E643, K780, Y787, K792, K830, Q846, K858, K867, K876, K890, R900, K901, M906, K921, K927, K928, K937, K939, R940, K945, Q975, R987, R990, K1001, R1034, I036, R1038, R1042, K1052, K1055, K1087, R1090, K1095, N1103, K1108, K1115, K1139, K1158, R1172, K1188, K1276, R1293, A1319, K1340, K1349, and/or K1356 with reference to amino acid position numbering of MbCpf1 (Moraxella bovoculi 237).

### Deactivated/Inactivated Cpf1 Protein

[0243] Where the Cpf1 protein has nuclease activity, the Cpf1 protein may be modified to have diminished nuclease activity e.g., nuclease inactivation of at least 70%, at least 80%, at least 90%, at least 95%, at least 97%, or 100% as compared with the wild type enzyme; or to put in another way, a Cpf1 enzyme having advantageously about 0% of the nuclease activity of the non-mutated or wild type Cpf1 enzyme or CRISPR enzyme, or no more than about 3% or about 5% or about 10% of the nuclease activity of the non-mutated or wild type Cpf1 enzyme, e.g. of the non-mutated or wild type Francisella novicida U112 (FnCpf1), Acidaminococcus sp. BV3L6 (AsCpf1), Lachnospiraceae bacterium ND2006 (LbCpf1) or Moraxella bovoculi 237 (MbCpf1 Cpf1 enzyme or CRISPR enzyme. This is possible by introducing mutations into the nuclease domains of the Cpf1 and orthologs thereof.

[0244] More particularly, the inactivated Cpf1 enzymes include enzymes mutated in amino acid positions As908, As993, As1263 of AsCpf1 or corresponding positions in Cpf1 orthologs. Additionally, the inactivated Cpf1 enzymes include enzymes mutated in amino acid position Lb832, 925, 947 or 1180 of LbCpf1 or corresponding positions in Cpf1 orthologs. More particularly, the inactivated Cpf1 enzymes include enzymes comprising one or more of mutations AsD908A, AsE993A, AsD1263A of AsCpf1 or corresponding mutations in Cpf1 orthologs. Additionally, the inactivated Cpf1 enzymes include enzymes comprising one or more of mutations LbD832A, E925A, D947A or D1180A of LbCpf1 or corresponding mutations in Cpf1 orthologs.

[0245] The inactivated Cpf1 CRISPR enzyme may have associated (e.g., via fusion protein) one or more functional domains, including for example, one or more domains from the group comprising, consisting essentially of, or consisting of methylase activity, demethylase activity, transcription activation activity, transcription repression activity, transcription release factor activity, histone modification activity, RNA cleavage activity, DNA cleavage activity, nucleic acid binding activity, and molecular switches (e.g., light inducible). Preferred domains are Fok1, VP64, P65, HSF1, MyoD1. In the event that Fok1 is provided, it is advantageous that multiple Fok1 functional domains are provided to allow for a functional dimer and that gRNAs are designed to provide proper spacing for functional use (Fok1) as specifically described in Tsai et al. Nature Biotechnology, Vol. 32, Number 6, June 2014). The adaptor protein may utilize known linkers to attach such functional domains. In some cases it is advantageous that additionally at least one NLS is provided. In some instances, it is advantageous to position the NLS at the N terminus. When more than one functional domain is included, the functional domains may be the same or different.

[0246] In general, the positioning of the one or more functional domain on the inactivated Cpf1 enzyme is one which allows for correct spatial orientation for the functional domain to affect the target with the attributed functional effect. For example, if the functional domain is a transcription activator (e.g., VP64 or p65), the transcription activator is placed in a spatial orientation which allows it to affect the transcription of the target. Likewise, a transcription repressor will be advantageously positioned to affect the transcription of the target, and a nuclease (e.g., Fok1) will be advantageously positioned to cleave or partially cleave the target. This may include positions other than the N-/C-terminus of the CRISPR enzyme.

### Enzyme Mutations Reducing Off-Target Effects

[0247] In one aspect, the invention provides a non-naturally occurring or engineered CRISPR enzyme, preferably a class 2 CRISPR enzyme, preferably a Type V or VI CRISPR enzyme as described herein, such as preferably, but without limitation Cpf1 as described herein elsewhere, having one or more mutations resulting in reduced off-target effects, i.e. improved CRISPR enzymes for use in effecting modifications to target loci but which reduce or eliminate activity towards off-targets, such as when complexed to guide RNAs, as well as improved CRISPR enzymes for increasing the activity of CRISPR enzymes, such as when complexed with guide RNAs. It is to be understood that mutated enzymes as described herein below may be used in any of the methods according to the invention as described herein elsewhere. Any of the methods, products, compositions and uses as described herein elsewhere are equally applicable with the mutated CRISPR enzymes as further detailed below. It is to be understood, that in the aspects and embodiments as described herein, when referring to or reading on Cpf1 as the CRISPR enzyme, reconstitution of a functional CRISPR-Cas system preferably does not require or is not dependent on a tracr sequence and/or direct repeat is 5′ (upstream) of the guide (target or spacer) sequence.

[0248] By means of further guidance, the following particular aspects and embodiments are provided.

[0249] The inventors have surprisingly determined that modifications may be made to CRISPR enzymes which confer reduced off-target activity compared to unmodified CRISPR enzymes and/or increased target activity compared to unmodified CRISPR enzymes. Thus, in certain aspects of the invention provided herein are improved CRISPR enzymes which may have utility in a wide range of gene modifying applications. Also provided herein are CRISPR complexes, compositions and systems, as well as methods and uses, all comprising the herein disclosed modified CRISPR enzymes.

[0250] In this disclosure, the term “Cas” can mean “Cpf1” or a CRISPR enzyme. In the context of this aspect of the invention, a Cpf1 or CRISPR enzyme is mutated or modified, “whereby the enzyme in the CRISPR complex has reduced capability of modifying one or more off-target loci as compared to an unmodified enzyme” (or like expressions); and, when reading this specification, the terms “Cpf1” or “Cas” or “CRISPR enzyme and the like are meant to include mutated or modified Cpf1 or Cas or CRISPR enzyme in accordance with the invention, i.e., “whereby the enzyme in the CRISPR complex has reduced capability of modifying one or more off-target loci as compared to an unmodified enzyme” (or like expressions).

[0251] In an aspect, there is provided an engineered Cpf1 protein as defined herein, such as Cpf1, wherein the protein complexes with a nucleic acid molecule comprising RNA to form a CRISPR complex, wherein when in the CRISPR complex, the nucleic acid molecule targets one or more target polynucleotide loci, the protein comprises at least one modification compared to unmodified Cpf1 protein, and wherein the CRISPR complex comprising the modified protein has altered activity as compared to the complex comprising the unmodified Cpf1 protein. It is to be understood that when referring herein to CRISPR “protein”, the Cpf1 protein preferably is a modified CRISPR enzyme (e.g. having increased or decreased (or no) enzymatic activity, such as without limitation including Cpf1. The term “CRISPR protein” may be used interchangeably with “CRISPR enzyme”, irrespective of whether the CRISPR protein has altered, such as increased or decreased (or no) enzymatic activity, compared to the wild type CRISPR protein.

[0252] In an aspect, the altered activity of the engineered CRISPR protein comprises an altered binding property as to the nucleic acid molecule comprising RNA or the target polynucleotide loci, altered binding kinetics as to the nucleic acid molecule comprising RNA or the target polynucleotide loci, or altered binding specificity as to the nucleic acid molecule comprising RNA or the target polynucleotide loci compared to off-target polynucleotide loci.

[0253] In some embodiments, the unmodified Cas has DNA cleavage activity, such as Cpf1. In some embodiments, the Cas directs cleavage of one or both strands at the location of a target sequence, such as within the target sequence and/or within the complement of the target sequence. In some embodiments, the Cas directs cleavage of one or both strands within about 1, 2, 3, 4, 5, 6, 7, 8, 9, 10, 15, 20, 25, 50, 100, 200, 500, or more base pairs from the first or last nucleotide of a target sequence. In some embodiments, a vector encodes a Cas that is mutated to with respect to a corresponding wild-type enzyme such that the mutated Cas lacks the ability to cleave one or both strands of a target polynucleotide containing a target sequence. In some embodiments, a Cas is considered to substantially lack all DNA cleavage activity when the DNA cleavage activity of the mutated enzyme is about no more than 25%, 10%, 5%, 1%, 0.1%, 0.01%, or less of the DNA cleavage activity of the non-mutated form of the enzyme; an example can be when the DNA cleavage activity of the mutated form is nil or negligible as compared with the non-mutated form. Thus, the Cas may comprise one or more mutations and may be used as a generic DNA binding protein with or without fusion to a functional domain. The mutations may be artificially introduced mutations or gain- or loss-of-function mutations. In one aspect of the invention, the Cas enzyme may be fused to a protein, e.g., a TAG, and/or an inducible/controllable domain such as a chemically inducible/controllable domain. The Cas in the invention may be a chimeric Cas proteins; e.g., a Cas having enhanced function by being a chimera. Chimeric Cas proteins may be new Cas containing fragments from more than one naturally occurring Cas. These may comprise fusions of N-terminal fragment(s) of one Cas9 homolog with C-terminal fragment(s) of another Cas homolog. The Cas can be delivered into the cell in the form of mRNA. The expression of Cas can be under the control of an inducible promoter. It is explicitly an object of the invention to avoid reading on known mutations. Indeed, the phrase “whereby the enzyme in the CRISPR complex has reduced capability of modifying one or more off-target loci as compared to an unmodified enzyme and/or whereby the enzyme in the CRISPR complex has increased capability of modifying the one or more target loci as compared to an unmodified enzyme” (or like expressions) is not intended to read upon mutations that only result in a nickase or dead Cas or known Cas9 mutations. HOWEVER, this is not to say that the instant invention modification(s) or mutation(s) “whereby the enzyme in the CRISPR complex has reduced capability of modifying one or more off-target loci as compared to an unmodified enzyme and/or whereby the enzyme in the CRISPR complex has increased capability of modifying the one or more target loci as compared to an unmodified enzyme” (or like expressions) cannot be combined with mutations that result in the enzyme being a nickase or dead. Such a dead enzyme can be an enhanced nucleic acid molecule binder. And such a nickase can be an enhanced nickase. For instance, changing neutral amino acid(s) in and/or near the groove and/or other charged residues in other locations in Cas that are in close proximity to a nucleic acid (e.g., DNA, cDNA, RNA, gRNA to positive charged amino acid(s) may result in “whereby the enzyme in the CRISPR complex has reduced capability of modifying one or more off-target loci as compared to an unmodified enzyme and/or whereby the enzyme in the CRISPR complex has increased capability of modifying the one or more target loci as compared to an unmodified enzyme”, e.g., more cutting. As this can be both enhanced on- and off-target cutting (a super cutting Cpf1), using such with what is known in the art as a tru-guide or tru-sgRNAs (see, e.g., Fu et al., “Improving CRISPR-Cas nuclease specificity using truncated guide RNAs,” Nature Biotechnology 32, 279-284 (2014) doi:10.1038/nbt.2808 Received 17 Nov. 2013 Accepted 6 Jan. 2014 Published online 26 Jan. 2014 Corrected online 29 Jan. 2014) to have enhanced on target activity without higher off target cutting or for making super cutting nickases, or for combination with a mutation that renders the Cas dead for a super binder.

[0254] In certain embodiments, the altered activity of the engineered Cpf1 protein comprises increased targeting efficiency or decreased off-target binding. In certain embodiments, the altered activity of the engineered Cpf1 protein comprises modified cleavage activity.

[0255] In certain embodiments, the altered activity comprises altered binding property as to the nucleic acid molecule comprising RNA or the target polynucleotide loci, altered binding kinetics as to the nucleic acid molecule comprising RNA or the target polynucleotide loci, or altered binding specificity as to the nucleic acid molecule comprising RNA or the target polynucleotide loci compared to off-target polynucleotide loci.

[0256] In certain embodiments, the altered activity comprises increased targeting efficiency or decreased off-target binding. In certain embodiments, the altered activity comprises modified cleavage activity. In certain embodiments, the altered activity comprises increased cleavage activity as to the target polynucleotide loci. In certain embodiments, the altered activity comprises decreased cleavage activity as to the target polynucleotide loci. In certain embodiments, the altered activity comprises decreased cleavage activity as to off-target polynucleotide loci. In certain embodiments, the altered activity comprises increased cleavage activity as to off-target polynucleotide loci.

[0257] In certain embodiments, the altered activity comprises increased cleavage activity as to the target polynucleotide loci. In certain embodiments, the altered activity comprises decreased cleavage activity as to the target polynucleotide loci. In certain embodiments, the altered activity comprises decreased cleavage activity as to off-target polynucleotide loci. In certain embodiments, the altered activity comprises increased cleavage activity as to off-target polynucleotide loci. Accordingly, in certain embodiments, there is increased specificity for target polynucleotide loci as compared to off-target polynucleotide loci. In other embodiments, there is reduced specificity for target polynucleotide loci as compared to off-target polynucleotide loci.

[0258] In an aspect of the invention, the altered activity of the engineered Cpf1 protein comprises altered helicase kinetics.

[0259] In an aspect of the invention, the engineered Cpf1 protein comprises a modification that alters association of the protein with the nucleic acid molecule comprising RNA, or a strand of the target polynucleotide loci, or a strand of off-target polynucleotide loci. In an aspect of the invention, the engineered Cpf1 protein comprises a modification that alters formation of the CRISPR complex.

[0260] In certain embodiments, the modified Cpf1 protein comprises a modification that alters targeting of the nucleic acid molecule to the polynucleotide loci. In certain embodiments, the modification comprises a mutation in a region of the protein that associates with the nucleic acid molecule. In certain embodiments, the modification comprises a mutation in a region of the protein that associates with a strand of the target polynucleotide loci. In certain embodiments, the modification comprises a mutation in a region of the protein that associates with a strand of the off-target polynucleotide loci. In certain embodiments, the modification or mutation comprises decreased positive charge in a region of the protein that associates with the nucleic acid molecule comprising RNA, or a strand of the target polynucleotide loci, or a strand of off-target polynucleotide loci. In certain embodiments, the modification or mutation comprises decreased negative charge in a region of the protein that associates with the nucleic acid molecule comprising RNA, or a strand of the target polynucleotide loci, or a strand of off-target polynucleotide loci. In certain embodiments, the modification or mutation comprises increased positive charge in a region of the protein that associates with the nucleic acid molecule comprising RNA, or a strand of the target polynucleotide loci, or a strand of off-target polynucleotide loci. In certain embodiments, the modification or mutation comprises increased negative charge in a region of the protein that associates with the nucleic acid molecule comprising RNA, or a strand of the target polynucleotide loci, or a strand of off-target polynucleotide loci. In certain embodiments, the modification or mutation increases steric hindrance between the protein and the nucleic acid molecule comprising RNA, or a strand of the target polynucleotide loci, or a strand of off-target polynucleotide loci. In certain embodiments, the modification or mutation comprises a substitution of Lys, His, Arg, Glu, Asp, Ser, Gly, or Thr. In certain embodiments, the modification or mutation comprises a substitution with Gly, Ala, Ile, Glu, or Asp. In certain embodiments, the modification or mutation comprises an amino acid substitution in a binding groove.

[0261] In as aspect, the present invention provides:
[0262] a non-naturally-occurring CRISPR enzyme as defined herein, such as Cpf1, wherein:

[0263] the enzyme complexes with guide RNA to form a CRISPR complex,

[0264] when in the CRISPR complex, the guide RNA targets one or more target polynucleotide loci and the enzyme alters the polynucleotide loci, and

[0265] the enzyme comprises at least one modification,
[0266] whereby the enzyme in the CRISPR complex has reduced capability of modifying one or more off-target loci as compared to an unmodified enzyme, and/or whereby the enzyme in the CRISPR complex has increased capability of modifying the one or more target loci as compared to an unmodified enzyme.

[0267] In any such non-naturally-occurring CRISPR enzyme, the modification may comprise modification of one or more amino acid residues of the enzyme.

[0268] In any such non-naturally-occurring CRISPR enzyme, the modification may comprise modification of one or more amino acid residues located in a region which comprises residues which are positively charged in the unmodified enzyme.

[0269] In any such non-naturally-occurring CRISPR enzyme, the modification may comprise modification of one or more amino acid residues which are positively charged in the unmodified enzyme.

[0270] In any such non-naturally-occurring CRISPR enzyme, the modification may comprise modification of one or more amino acid residues which are not positively charged in the unmodified enzyme.

[0271] The modification may comprise modification of one or more amino acid residues which are uncharged in the unmodified enzyme.

[0272] The modification may comprise modification of one or more amino acid residues which are negatively charged in the unmodified enzyme.

[0273] The modification may comprise modification of one or more amino acid residues which are hydrophobic in the unmodified enzyme.

[0274] The modification may comprise modification of one or more amino acid residues which are polar in the unmodified enzyme.

[0275] In certain of the above-described non-naturally-occurring CRISPR enzymes, the modification may comprise modification of one or more residues located in a groove.

[0276] In certain of the above-described non-naturally-occurring CRISPR enzymes, the modification may comprise modification of one or more residues located outside of a groove.

[0277] In certain of the above-described non-naturally-occurring CRISPR enzymes, the modification comprises a modification of one or more residues wherein the one or more residues comprises arginine, histidine or lysine.

[0278] In any of the above-described non-naturally-occurring CRISPR enzymes, the enzyme may be modified by mutation of said one or more residues.

[0279] In certain of the above-described non-naturally-occurring CRISPR enzymes, the enzyme is modified by mutation of said one or more residues, and wherein the mutation comprises substitution of a residue in the unmodified enzyme with an alanine residue.

[0280] In certain of the above-described non-naturally-occurring CRISPR enzymes, the enzyme is modified by mutation of said one or more residues, and wherein the mutation comprises substitution of a residue in the unmodified enzyme with aspartic acid or glutamic acid.

[0281] In certain of the above-described non-naturally-occurring CRISPR enzymes, the enzyme is modified by mutation of said one or more residues, and wherein the mutation comprises substitution of a residue in the unmodified enzyme with serine, threonine, asparagine or glutamine.

[0282] In certain of the above-described non-naturally-occurring CRISPR enzymes, the enzyme is modified by mutation of said one or more residues, and wherein the mutation comprises substitution of a residue in the unmodified enzyme with alanine, glycine, isoleucine, leucine, methionine, phenylalanine, tryptophan, tyrosine or valine.

[0283] In certain of the above-described non-naturally-occurring CRISPR enzymes, the enzyme is modified by mutation of said one or more residues, and wherein the mutation comprises substitution of a residue in the unmodified enzyme with a polar amino acid residue.

[0284] In certain of the above-described non-naturally-occurring CRISPR enzymes, the enzyme is modified by mutation of said one or more residues, and wherein the mutation comprises substitution of a residue in the unmodified enzyme with an amino acid residue which is not a polar amino acid residue.

[0285] In certain of the above-described non-naturally-occurring CRISPR enzymes, the enzyme is modified by mutation of said one or more residues, and wherein the mutation comprises substitution of a residue in the unmodified enzyme with a negatively charged amino acid residue.

[0286] In certain of the above-described non-naturally-occurring CRISPR enzymes, the enzyme is modified by mutation of said one or more residues, and wherein the mutation comprises substitution of a residue in the unmodified enzyme with an amino acid residue which is not a negatively charged amino acid residue.

[0287] In certain of the above-described non-naturally-occurring CRISPR enzymes, the enzyme is modified by mutation of said one or more residues, and wherein the mutation comprises substitution of a residue in the unmodified enzyme with an uncharged amino acid residue

[0288] In certain of the above-described non-naturally-occurring CRISPR enzymes, the enzyme is modified by mutation of said one or more residues, and wherein the mutation comprises substitution of a residue in the unmodified enzyme with an amino acid residue which is not an uncharged amino acid residue.

[0289] In certain of the above-described non-naturally-occurring CRISPR enzymes, the enzyme is modified by mutation of said one or more residues, and wherein the mutation comprises substitution of a residue in the unmodified enzyme with a hydrophobic amino acid residue

[0290] In certain of the above-described non-naturally-occurring CRISPR enzymes, the enzyme is modified by mutation of said one or more residues, and wherein the mutation comprises substitution of a residue in the unmodified enzyme with an amino acid residue which is not a hydrophobic amino acid residue.

[0291] In some embodiments, the CRISPR enzyme, such as preferably Cpf1 enzyme is derived Francisella tularensis 1, Francisella tularensis subsp. novicida, Prevotella albensis, Lachnospiraceae bacterium MC2017 1, Butyrivibrio proteoclasticus, Peregrinibacteria bacterium GW2011_GWA2_33_10, Parcubacteria bacterium GW2011_GWC2_44_17, Smithella sp. SCADC, Acidaminococcus sp. BV3L6, Lachnospiraceae bacterium MA2020, Candidatus Methanoplasma termitum, Eubacterium eligens, Moraxella bovoculi 237, Leptospira inadai, Lachnospiraceae bacterium ND2006, Porphyromonas crevioricanis 3, Prevotella disiens, or Porphyromonas macacae Cpf1 (e.g., a Cpf1 of one of these organisms modified as described herein), and may include further mutations or alterations or be a chimeric Cpf1.

[0292] In certain embodiments, the Cpf1 protein comprises one or more nuclear localization signal (NLS) domains. In certain embodiments, the Cpf1 protein comprises at least two or more NLSs.

[0293] In certain embodiments, the Cpf1 protein comprises a chimeric CRISPR protein, comprising a first fragment from a first CRISPR orthologue and a second fragment from a second CRISPR orthologue, and the first and second CRISPR orthologues are different.

[0294] In certain embodiments, the enzyme is modified by or comprises modification, e.g., comprises, consists essentially of or consists of modification by mutation of any one of the residues listed herein or a corresponding residue in the respective orthologue; or the enzyme comprises, consists essentially of or consists of modification in any one (single), two (double), three (triple), four (quadruple) or more position(s) in accordance with the disclosure throughout this application, or a corresponding residue or position in the CRISPR enzyme orthologue, e.g., an enzyme comprising, consisting essentially of or consisting of modification in any one of the Cpf1 residues recited herein, or a corresponding residue or position in the CRISPR enzyme orthologue. In such an enzyme, each residue may be modified by substitution with an alanine residue.

[0295] Applicants recently described a method for the generation of Cas9 orthologues with enhanced specificity (Slaymaker et al. 2015 “Rationally engineered Cas9 nucleases with improved specificity”). This strategy can be used to enhance the specificity of Cpf1 orthologues. Primary residues for mutagenesis are preferably all positive charges residues within the RuvC domain. Additional residues are positive charged residues that are conserved between different orthologues.

[0296] In certain embodiments, specificity of Cpf1 may be improved by mutating residues that stabilize the non-targeted DNA strand.

[0297] In certain of the above-described non-naturally-occurring Cpf1 enzymes, the enzyme is modified by mutation of one or more residues (in the RuvC domain) including but not limited positions R909, R912, R930, R947, K949, R951, R955, K965, K968, K1000, K1002, R1003, K1009, K1017, K1022, K1029, K1035, K1054, K1072, K1086, R1094, K1095, K1109, K1118, K1142, K1150, K1158, K1159, R1220, R1226, R1242, and/or R1252 with reference to amino acid position numbering of AsCpf1 (Acidaminococcus sp. BV3L6).

[0298] In certain of the above-described non-naturally-occurring Cpf1 enzymes, the enzyme is modified by mutation of one or more residues (in the RAD50) domain including but not limited positions K324, K335, K337, R331, K369, K370, R386, R392, R393, K400, K404, K406, K408, K414, K429, K436, K438, K459, K460, K464, R670, K675, R681, K686, K689, R699, K705, R725, K729, K739, K748, and/or K752 with reference to amino acid position numbering of AsCpf1 (Acidaminococcus sp. BV3L6).

[0299] In certain of the above-described non-naturally-occurring Cpf1 enzymes, the enzyme is modified by mutation of one or more residues including but not limited positions R912, T923, R947, K949, R951, R955, K965, K968, K1000, R1003, K1009, K1017, K1022, K1029, K1072, K1086, F1103, R1226, and/or R1252 with reference to amino acid position numbering of AsCpf1 (Acidaminococcus sp. BV3L6).

[0300] In certain embodiments, the enzyme is modified by mutation of one or more residues including but not limited positions R833, R836, K847, K879, K881, R883, R887, K897, K900, K932, R935, K940, K948, K953, K960, K984, K1003, K1017, R1033, R1138, R1165, and/or R1252 with reference to amino acid position numbering of LbCpf1 (Lachnospiraceae bacterium ND2006).

[0301] In certain embodiments, the Cpf1 enzyme is modified by mutation of one or more residues including but not limited positions K15, R18, K26, Q34, R43, K48, K51, R56, R84, K85, K87, N93, R103, N104, T118, K123, K134, R176, K177, R192, K200, K226, K273, K275, T291, R301, K307, K369, S404, V409, K414, K436, K438, K468, D482, K516, R518, K524, K530, K532, K548, K559, K570, R574, K592, D596, K603, K607, K613, C647, R681, K686, H720, K739, K748, K757, T766, K780, R790, P791, K796, K809, K815, T816, K860, R862, R863, K868, K897, R909, R912, T923, R947, K949, R951, R955, K965, K968, K1000, R1003, K1009, K1017, K1022, K1029, A1053, K1072, K1086, F1103, S1209, R1226, R1252, K1273, K1282, and/or K1288 with reference to amino acid position numbering of AsCpf1 (Acidaminococcus sp. BV3L6).

[0302] In certain embodiments, the Cpf1 enzyme is modified by mutation of one or more residues including but not limited positions K15, R18, K26, R34, R43, K48, K51, K56, K87, K88, D90, K96, K106, K107, K120, Q125, K143, R186, K187, R202, K210, K235, K296, K298, K314, K320, K326, K397, K444, K449, E454, A483, E491, K527, K541, K581, R583, K589, K595, K597, K613, K624, K635, K639, K656, K660, K667, K671, K677, K719, K725, K730, K763, K782, K791, R800, K809, K823, R833, K834, K839, K852, K858, K859, K869, K871, R872, K877, K905, R918, R921, K932, I960, K962, R964, R968, K978, K981, K1013, R1016, K1021, K1029, K1034, K1041, K1065, K1084, and/or K1098 with reference to amino acid position numbering of FnCpf1 (Francisella novicida U112).

[0303] In certain embodiments, the Cpf1 enzyme is modified by mutation of one or more residues including but not limited positions K15, R18, K26, K34, R43, K48, K51, R56, K83, K84, R86, K92, R102, K103, K116, K121, R158, E159, R174, R182, K206, K251, K253, K269, K271, K278, P342, K380, R385, K390, K415, K421, K457, K471, A506, R508, K514, K520, K522, K538, Y548, K560, K564, K580, K584, K591, K595, K601, K634, K640, R645, K679, K689, K707, T716, K725, R737, R747, R748, K753, K768, K774, K775, K785, K787, R788, Q793, K821, R833, R836, K847, K879, K881, R883, R887, K897, K900, K932, R935, K940, K948, K953, K960, K984, K1003, K1017, R1033, K1121, R1138, R1165, K1190, K1199, and/or K1208 with reference to amino acid position numbering of LbCpf1 (Lachnospiraceae bacterium ND2006).

[0304] In certain embodiments, the enzyme is modified by mutation of one or more residues including but not limited positions K14, R17, R25, K33, M42, Q47, K50, D55, K85, N86, K88, K94, R104, K105, K118, K123, K131, R174, K175, R190, R198, I221, K267, Q269, K285, K291, K297, K357, K403, K409, K414, K448, K460, K501, K515, K550, R552, K558, K564, K566, K582, K593, K604, K608, K623, K627, K633, K637, E643, K780, Y787, K792, K830, Q846, K858, K867, K876, K890, R900, K901, M906, K921, K927, K928, K937, K939, R940, K945, Q975, R987, R990, K1001, R1034, I036, R1038, R1042, K1052, K1055, K1087, R1090, K1095, N1103, K1108, K1115, K1139, K1158, R1172, K1188, K1276, R1293, A1319, K1340, K1349, and/or K1356 with reference to amino acid position numbering of MbCpf1 (Moraxella bovoculi 237).

[0305] In any of the non-naturally-occurring CRISPR enzymes:

[0306] a single mismatch may exist between the target and a corresponding sequence of the one or more off-target loci; and/or

[0307] two, three or four or more mismatches may exist between the target and a corresponding sequence of the one or more off-target loci, and/or
[0308] wherein in (ii) said two, three or four or more mismatches are contiguous.

[0309] In any of the non-naturally-occurring CRISPR enzymes the enzyme in the CRISPR complex may have reduced capability of modifying one or more off-target loci as compared to an unmodified enzyme and wherein the enzyme in the CRISPR complex has increased capability of modifying the said target loci as compared to an unmodified enzyme.

[0310] In any of the non-naturally-occurring CRISPR enzymes, when in the CRISPR complex the relative difference of the modifying capability of the enzyme as between target and at least one off-target locus may be increased compared to the relative difference of an unmodified enzyme.

[0311] In any of the non-naturally-occurring CRISPR enzymes, the CRISPR enzyme may comprise one or more additional mutations, wherein the one or more additional mutations are in one or more catalytically active domains.

[0312] In such non-naturally-occurring CRISPR enzymes, the CRISPR enzyme may have reduced or abolished nuclease activity compared with an enzyme lacking said one or more additional mutations.

[0313] In some such non-naturally-occurring CRISPR enzymes, the CRISPR enzyme does not direct cleavage of one or other DNA strand at the location of the target sequence.

[0314] Where the CRISPR enzyme comprises one or more additional mutations in one or more catalytically active domains, the one or more additional mutations may be in a catalytically active domain of the CRISPR enzyme comprising RuvCI, RuvCII or RuvCIII.

[0315] Without being bound by theory, in an aspect of the invention, the methods and mutations described provide for enhancing conformational rearrangement of CRISPR enzyme domains (e.g. Cpf1 domains) to positions that results in cleavage at on-target sits and avoidance of those conformational states at off-target sites. CRISPR enzymes cleave target DNA in a series of coordinated steps. First, the PAM-interacting domain recognizes the PAM sequence 5′ of the target DNA. After PAM binding, the first 10-12 nucleotides of the target sequence (seed sequence) are sampled for gRNA:DNA complementarity, a process dependent on DNA duplex separation. If the seed sequence nucleotides complement the gRNA, the remainder of DNA is unwound and the full length of gRNA hybridizes with the target DNA strand. nt-grooves may stabilize the non-targeted DNA strand and facilitate unwinding through non-specific interactions with positive charges of the DNA phosphate backbone. RNA:cDNA and CRISPR enzyme:ncDNA interactions drive DNA unwinding in competition against cDNA:ncDNA rehybridization. Other CRISPR enzyme domains may affect the conformation of nuclease domains as well, for example linkers connecting different domains. Accordingly, the methods and mutations provided encompass, without limitation, RuvCI, RuvCIII, RuvCIII and linkers. Conformational changes in for instance Cpf1 brought about by target DNA binding, including seed sequence interaction, and interactions with the target and non-target DNA strand determine whether the domains are positioned to trigger nuclease activity. Thus, the mutations and methods provided herein demonstrate and enable modifications that go beyond PAM recognition and RNA-DNA base pairing.

[0316] In an aspect, the invention provides CRISPR nucleases as defined herein, such as Cpf1, that comprise an improved equilibrium towards conformations associated with cleavage activity when involved in on-target interactions and/or improved equilibrium away from conformations associated with cleavage activity when involved in off-target interactions. In one aspect, the invention provides Cas (e.g. Cpf1) nucleases with improved proof-reading function, i.e. a Cas (e.g. Cpf1) nuclease which adopts a conformation comprising nuclease activity at an on-target site, and which conformation has increased unfavorability at an off-target site. Sternberg et al., Nature 527(7576):110-3, doi: 10.1038/nature15544, published online 28 Oct. 2015. Epub 2015 Oct. 28, used Förster resonance energy transfer FRET) experiments to detect relative orientations of the Cas (e.g. Cpf1) catalytic domains when associated with on- and off-target DNA, and which may be extrapolated to the CRISPR enzymes of the present invention (e.g. Cpf1).

[0317] The invention further provides methods and mutations for modulating nuclease activity and/or specificity using modified guide RNAs. As discussed, on-target nuclease activity can be increased or decreased. Also, off-target nuclease activity can be increased or decreased. Further, there can be increased or decreased specificity as to on-target activity vs. off-target activity. Modified guide RNAs include, without limitation, truncated guide RNAs, dead guide RNAs, chemically modified guide RNAs, guide RNAs associated with functional domains, modified guide RNAs comprising functional domains, modified guide RNAs comprising aptamers, modified guide RNAs comprising adapter proteins, and guide RNAs comprising added or modified loops. In some embodiments, one or more functional domains are associated with an dead gRNA (dRNA). In some embodiments, a dRNA complex with the CRISPR enzyme directs gene regulation by a functional domain at on gene locus while an gRNA directs DNA cleavage by the CRISPR enzyme at another locus. In some embodiments, dRNAs are selected to maximize selectivity of regulation for a gene locus of interest compared to off-target regulation. In some embodiments, dRNAs are selected to maximize target gene regulation and minimize target cleavage.

[0318] For the purposes of the following discussion, reference to a functional domain could be a functional domain associated with the CRISPR enzyme or a functional domain associated with the adaptor protein.

[0319] In the practice of the invention, loops of the gRNA may be extended, without colliding with the Cas (e.g. Cpf1) protein by the insertion of distinct RNA loop(s) or distinct sequence(s) that may recruit adaptor proteins that can bind to the distinct RNA loop(s) or distinct sequence(s). The adaptor proteins may include but are not limited to orthogonal RNA-binding protein/aptamer combinations that exist within the diversity of bacteriophage coat proteins. A list of such coat proteins includes, but is not limited to: Qβ, F2, GA, fr, JP501, M12, R17, BZ13, JP34, JP500, KU1, M11, MX1, TW18, VK, SP, FI, ID2, NL95, TW19, AP205, φCb5, φCb8r, φCb12r, φCb23r, 7s and PRR1. These adaptor proteins or orthogonal RNA binding proteins can further recruit effector proteins or fusions which comprise one or more functional domains. In some embodiments, the functional domain may be selected from the group consisting of: transposase domain, integrase domain, recombinase domain, resolvase domain, invertase domain, protease domain, DNA methyltransferase domain, DNA hydroxylmethylase domain, DNA demethylase domain, histone acetylase domain, histone deacetylases domain, nuclease domain, repressor domain, activator domain, nuclear-localization signal domains, transcription-regulatory protein (or transcription complex recruiting) domain, cellular uptake activity associated domain, nucleic acid binding domain, antibody presentation domain, histone modifying enzymes, recruiter of histone modifying enzymes; inhibitor of histone modifying enzymes, histone methyltransferase, histone demethylase, histone kinase, histone phosphatase, histone ribosylase, histone deribosylase, histone ubiquitinase, histone deubiquitinase, histone biotinase and histone tail protease. In some preferred embodiments, the functional domain is a transcriptional activation domain, such as, without limitation, VP64, p65, MyoD1, HSF1, RTA, SET7/9 or a histone acetyltransferase. In some embodiments, the functional domain is a transcription repression domain, preferably KRAB. In some embodiments, the transcription repression domain is SID, or concatemers of SID (eg SID4X). In some embodiments, the functional domain is an epigenetic modifying domain, such that an epigenetic modifying enzyme is provided. In some embodiments, the functional domain is an activation domain, which may be the P65 activation domain.

[0320] In an aspect, the invention also provides methods and mutations for modulating Cas (e.g. Cpf1) binding activity and/or binding specificity. In certain embodiments Cas (e.g. Cpf1) proteins lacking nuclease activity are used. In certain embodiments, modified guide RNAs are employed that promote binding but not nuclease activity of a Cas (e.g. Cpf1) nuclease. In such embodiments, on-target binding can be increased or decreased. Also, in such embodiments off-target binding can be increased or decreased. Moreover, there can be increased or decreased specificity as to on-target binding vs. off-target binding.

[0321] The methods and mutations which can be employed in various combinations to increase or decrease activity and/or specificity of on-target vs. off-target activity, or increase or decrease binding and/or specificity of on-target vs. off-target binding, can be used to compensate or enhance mutations or modifications made to promote other effects. Such mutations or modifications made to promote other effects in include mutations or modification to the Cas (e.g. Cpf1) and or mutation or modification made to a guide RNA. In certain embodiments, the methods and mutations are used with chemically modified guide RNAs. Examples of guide RNA chemical modifications include, without limitation, incorporation of 2′-O-methyl (M), 2′-O-methyl 3′phosphorothioate (MS), or 2′-O-methyl 3′thioPACE (MSP) at one or more terminal nucleotides. Such chemically modified guide RNAs can comprise increased stability and increased activity as compared to unmodified guide RNAs, though on-target vs. off-target specificity is not predictable. (See, Hendel, 2015, Nat Biotechnol. 33(9):985-9, doi: 10.1038/nbt.3290, published online 29 Jun. 2015). Chemically modified guide RNAs further include, without limitation, RNAs with phosphorothioate linkages and locked nucleic acid (LNA) nucleotides comprising a methylene bridge between the 2′ and 4′ carbons of the ribose ring. The methods and mutations of the invention are used to modulate Cas (e.g. Cpf1) nuclease activity and/or binding with chemically modified guide RNAs.

[0322] In an aspect, the invention provides methods and mutations for modulating binding and/or binding specificity of Cas (e.g. Cpf1) proteins according to the invention as defined herein comprising functional domains such as nucleases, transcriptional activators, transcriptional repressors, and the like. For example, a Cas (e.g. Cpf1) protein can be made nuclease-null, or having altered or reduced nuclease activity by introducing mutations such as for instance Cpf1 mutations described herein elsewhere, and include for instance D917A, E1006A, E1028A, D1227A, D1255A, N1257A, D917A, E1006A, E1028A, D1227A, D1255A and N1257A with reference to the amino acid positions in the FnCpf1p RuvC domain; or for instance N580A, N584A, T587A, W609A, D610A, K613A, E614A, D616A, K624A, D625A, K627A and Y629A with reference to the putative second nuclease domain as described herein elsewhere. Nuclease deficient Cas (e.g. Cpf1) proteins are useful for RNA-guided target sequence dependent delivery of functional domains. The invention provides methods and mutations for modulating binding of Cas (e.g. Cpf1) proteins. In one embodiment, the functional domain comprises VP64, providing an RNA-guided transcription factor. In another embodiment, the functional domain comprises Fok I, providing an RNA-guided nuclease activity. Mention is made of U.S. Pat. Pub. 2014/0356959, U.S. Pat. Pub. 2014/0342456, U.S. Pat. Pub. 2015/0031132, and Mali, P. et al., 2013, Science 339(6121):823-6, doi: 10.1126/science.1232033, published online 3 Jan. 2013 and through the teachings herein the invention comprehends methods and materials of these documents applied in conjunction with the teachings herein. In certain embodiments, on-target binding is increased. In certain embodiments, off-target binding is decreased. In certain embodiments, on-target binding is decreased. In certain embodiments, off-target binding is increased. Accordingly, the invention also provides for increasing or decreasing specificity of on-target binding vs. off-target binding of functionalized Cas (e.g. Cpf1) binding proteins.

[0323] The use of Cas (e.g. Cpf1) as an RNA-guided binding protein is not limited to nuclease-null Cas (e.g. Cpf1). Cas (e.g. Cpf1) enzymes comprising nuclease activity can also function as RNA-guided binding proteins when used with certain guide RNAs. For example short guide RNAs and guide RNAs comprising nucleotides mismatched to the target can promote RNA directed Cas (e.g. Cpf1) binding to a target sequence with little or no target cleavage. (See, e.g., Dahlman, 2015, Nat Biotechnol. 33(11):1159-1161, doi: 10.1038/nbt.3390, published online 5 Oct. 2015). In an aspect, the invention provides methods and mutations for modulating binding of Cas (e.g. Cpf1) proteins that comprise nuclease activity. In certain embodiments, on-target binding is increased. In certain embodiments, off-target binding is decreased. In certain embodiments, on-target binding is decreased. In certain embodiments, off-target binding is increased. In certain embodiments, there is increased or decreased specificity of on-target binding vs. off-target binding. In certain embodiments, nuclease activity of guide RNA-Cas (e.g. Cpf1) enzyme is also modulated.

[0324] RNA-DNA heteroduplex formation is important for cleavage activity and specificity throughout the target region, not only the seed region sequence closest to the PAM. Thus, truncated guide RNAs show reduced cleavage activity and specificity. In an aspect, the invention provides method and mutations for increasing activity and specificity of cleavage using altered guide RNAs.

[0325] The invention also demonstrates that modifications of Cas (e.g. Cpf1) nuclease specificity can be made in concert with modifications to targeting range. Cas (e.g. Cpf1) mutants can be designed that have increased target specificity as well as accommodating modifications in PAM recognition, for example by choosing mutations that alter PAM specificity and combining those mutations with nt-groove mutations that increase (or if desired, decrease) specificity for on-target sequences vs. off-target sequences. In one such embodiment, a PI domain residue is mutated to accommodate recognition of a desired PAM sequence while one or more nt-groove amino acids is mutated to alter target specificity. The Cas (e.g. Cpf1) methods and modifications described herein can be used to counter loss of specificity resulting from alteration of PAM recognition, enhance gain of specificity resulting from alteration of PAM recognition, counter gain of specificity resulting from alteration of PAM recognition, or enhance loss of specificity resulting from alteration of PAM recognition.

[0326] The methods and mutations can be used with any Cas (e.g. Cpf1) enzyme with altered PAM recognition. Non-limiting examples of PAMs included are as described herein elsewhere.

[0327] In further embodiments, the methods and mutations are used modified proteins.

[0328] In any of the non-naturally-occurring CRISPR enzymes, the CRISPR enzyme may comprise one or more heterologous functional domains.

[0329] The one or more heterologous functional domains may comprise one or more nuclear localization signal (NLS) domains. The one or more heterologous functional domains may comprise at least two or more NLSs.

[0330] The one or more heterologous functional domains may comprise one or more transcriptional activation domains. A transcriptional activation domain may comprise VP64.

[0331] The one or more heterologous functional domains may comprise one or more transcriptional repression domains. A transcriptional repression domain may comprise a KRAB domain or a SID domain.

[0332] The one or more heterologous functional domain may comprise one or more nuclease domains. The one or more nuclease domains may comprise Fok1.

[0333] The one or more heterologous functional domains may have one or more of the following activities: methylase activity, demethylase activity, transcription activation activity, transcription repression activity, transcription release factor activity, histone modification activity, nuclease activity, single-strand RNA cleavage activity, double-strand RNA cleavage activity, single-strand DNA cleavage activity, double-strand DNA cleavage activity and nucleic acid binding activity.

[0334] The at least one or more heterologous functional domains may be at or near the amino-terminus of the enzyme and/or at or near the carboxy-terminus of the enzyme.

[0335] The one or more heterologous functional domains may be fused to the CRISPR enzyme, or tethered to the CRISPR enzyme, or linked to the CRISPR enzyme by a linker moiety.

[0336] In any of the non-naturally-occurring CRISPR enzymes, the CRISPR enzyme may comprise a CRISPR enzyme from an organism from a genus comprising Francisella tularensis 1, Francisella tularensis subsp. novicida, Prevotella albensis, Lachnospiraceae bacterium MC2017 1, Butyrivibrio proteoclasticus, Peregrinibacteria bacterium GW2011_GWA2_33_10, Parcubacteria bacterium GW2011_GWC2_44_17, Smithella sp. SCADC, Acidaminococcus sp. BV3L6, Lachnospiraceae bacterium MA2020, Candidatus Methanoplasma termitum, Eubacterium eligens, Moraxella bovoculi 237, Leptospira inadai, Lachnospiraceae bacterium ND2006, Porphyromonas crevioricanis 3, Prevotella disiens, or Porphyromonas macacae (e.g., a Cpf1 of one of these organisms modified as described herein), and may include further mutations or alterations or be a chimeric Cas (e.g. Cpf1).

[0337] In any of the non-naturally-occurring CRISPR enzymes, the CRISPR enzyme may comprise a chimeric Cas (e.g. Cpf1) enzyme comprising a first fragment from a first Cas (e.g. Cpf1) ortholog and a second fragment from a second Cas (e.g. Cpf1) ortholog, and the first and second Cas (e.g. Cpf1) orthologs are different. At least one of the first and second Cas (e.g. Cpf1) orthologs may comprise a Cas (e.g. Cpf1) from an organism comprising Francisella tularensis 1, Francisella tularensis subsp. novicida, Prevotella albensis, Lachnospiraceae bacterium MC2017 1, Butyrivibrio proteoclasticus, Peregrinibacteria bacterium GW2011_GWA2_33_10, Parcubacteria bacterium GW2011_GWC2_44_17, Smithella sp. SCADC, Acidaminococcus sp. BV3L6, Lachnospiraceae bacterium MA2020, Candidatus Methanoplasma termitum, Eubacterium eligens, Moraxella bovoculi 237, Leptospira inadai, Lachnospiraceae bacterium ND2006, Porphyromonas crevioricanis 3, Prevotella disiens, or Porphyromonas macacae.

[0338] In any of the non-naturally-occurring CRISPR enzymes, a nucleotide sequence encoding the CRISPR enzyme may be codon optimized for expression in a eukaryote.

[0339] In any of the non-naturally-occurring CRISPR enzymes, the cell may be a eukaryotic cell or a prokaryotic cell; wherein the CRISPR complex is operable in the cell, and whereby the enzyme of the CRISPR complex has reduced capability of modifying one or more off-target loci of the cell as compared to an unmodified enzyme and/or whereby the enzyme in the CRISPR complex has increased capability of modifying the one or more target loci as compared to an unmodified enzyme.

[0340] Accordingly, in an aspect, the invention provides a eukaryotic cell comprising the engineered CRISPR protein or the system as defined herein.

[0341] In certain embodiments, the methods as described herein may comprise providing a Cas (e.g. Cpf1) transgenic cell in which one or more nucleic acids encoding one or more guide RNAs are provided or introduced operably connected in the cell with a regulatory element comprising a promoter of one or more gene of interest. As used herein, the term “Cas transgenic cell” refers to a cell, such as a eukaryotic cell, in which a Cas gene has been genomically integrated. The nature, type, or origin of the cell are not particularly limiting according to the present invention. Also the way how the Cas transgene is introduced in the cell is may vary and can be any method as is known in the art. In certain embodiments, the Cas transgenic cell is obtained by introducing the Cas transgene in an isolated cell. In certain other embodiments, the Cas transgenic cell is obtained by isolating cells from a Cas transgenic organism. By means of example, and without limitation, the Cas transgenic cell as referred to herein may be derived from a Cas transgenic eukaryote, such as a Cas knock-in eukaryote. Reference is made to WO 2014/093622 (PCT/US13/74667), incorporated herein by reference. Methods of US Patent Publication Nos. 20120017290 and 20110265198 assigned to Sangamo BioSciences, Inc. directed to targeting the Rosa locus may be modified to utilize the CRISPR Cas system of the present invention. Methods of US Patent Publication No. 20130236946 assigned to Cellectis directed to targeting the Rosa locus may also be modified to utilize the CRISPR Cas system of the present invention. By means of further example reference is made to Platt et. al. (Cell; 159(2):440-455 (2014)), describing a Cas9 knock-in mouse, which is incorporated herein by reference, and which can be extrapolated to the CRISPR enzymes of the present invention as defined herein. The Cas transgene can further comprise a Lox-Stop-polyA-Lox (LSL) cassette thereby rendering Cas expression inducible by Cre recombinase. Alternatively, the Cas transgenic cell may be obtained by introducing the Cas transgene in an isolated cell. Delivery systems for transgenes are well known in the art. By means of example, the Cas transgene may be delivered in for instance eukaryotic cell by means of vector (e.g., AAV, adenovirus, lentivirus) and/or particle and/or nanoparticle delivery, as also described herein elsewhere.

[0342] It will be understood by the skilled person that the cell, such as the Cas transgenic cell, as referred to herein may comprise further genomic alterations besides having an integrated Cas gene or the mutations arising from the sequence specific action of Cas when complexed with RNA capable of guiding Cas to a target locus, such as for instance one or more oncogenic mutations, as for instance and without limitation described in Platt et al. (2014), Chen et al., (2014) or Kumar et al. (2009).

[0343] The invention also provides a composition comprising the engineered CRISPR protein as described herein, such as described in this section.

[0344] The invention also provides a non-naturally-occurring, engineered composition comprising a CRISPR-Cas complex comprising any the non-naturally-occurring CRISPR enzyme described above.

[0345] In an aspect, the invention provides in a vector system comprising one or more vectors, wherein the one or more vectors comprises:

[0346] a) a first regulatory element operably linked to a nucleotide sequence encoding the engineered CRISPR protein as defined herein; and optionally

[0347] b) a second regulatory element operably linked to one or more nucleotide sequences encoding one or more nucleic acid molecules comprising a guide RNA comprising a guide sequence, a direct repeat sequence, optionally wherein components (a) and (b) are located on same or different vectors.

[0348] The invention also provides a non-naturally-occurring, engineered composition comprising:

[0349] a delivery system operably configured to deliver CRISPR-Cas complex components or one or more polynucleotide sequences comprising or encoding said components into a cell, and wherein said CRISPR-Cas complex is operable in the cell,

[0350] CRISPR-Cas complex components or one or more polynucleotide sequences encoding for transcription and/or translation in the cell the CRISPR-Cas complex components, comprising:
[0351] (I) the non-naturally-occurring CRISPR enzyme (e.g. engineered Cpf1) as described herein;
[0352] (II) CRISPR-Cas guide RNA comprising:
[0353] the guide sequence, and
[0354] a direct repeat sequence,
[0355] wherein the enzyme in the CRISPR complex has reduced capability of modifying one or more off-target loci as compared to an unmodified enzyme and/or whereby the enzyme in the CRISPR complex has increased capability of modifying the one or more target loci as compared to an unmodified enzyme.

[0356] In an aspect, the invention also provides in a system comprising the engineered CRISPR protein as described herein, such as described in this section.

[0357] In any such compositions, the delivery system may comprise a yeast system, a lipofection system, a microinjection system, a biolistic system, virosomes, liposomes, immunoliposomes, polycations, lipid:nucleic acid conjugates or artificial virions, as defined herein elsewhere.

[0358] In any such compositions, the delivery system may comprise a vector system comprising one or more vectors, and wherein component (II) comprises a first regulatory element operably linked to a polynucleotide sequence which comprises the guide sequence, the direct repeat sequence and optionally, and wherein component (I) comprises a second regulatory element operably linked to a polynucleotide sequence encoding the CRISPR enzyme.

[0359] In any such compositions, the delivery system may comprise a vector system comprising one or more vectors, and wherein component (II) comprises a first regulatory element operably linked to the guide sequence and the direct repeat sequence, and wherein component (I) comprises a second regulatory element operably linked to a polynucleotide sequence encoding the CRISPR enzyme.

[0360] In any such compositions, the composition may comprise more than one guide RNA, and each guide RNA has a different target whereby there is multiplexing.

[0361] In any such compositions, the polynucleotide sequence(s) may be on one vector.

[0362] The invention also provides an engineered, non-naturally occurring Clustered Regularly Interspersed Short Palindromic Repeats (CRISPR)-CRISPR associated (Cas) (CRISPR-Cas) vector system comprising one or more vectors comprising:

a) a first regulatory element operably linked to a nucleotide sequence encoding a non-naturally-occurring CRISPR enzyme of any one of the inventive constructs herein; and
b) a second regulatory element operably linked to one or more nucleotide sequences encoding one or more of the guide RNAs, the guide RNA comprising a guide sequence, a direct repeat sequence,
wherein:

[0363] components (a) and (b) are located on same or different vectors,
[0364] the CRISPR complex is formed;
[0365] the guide RNA targets the target polynucleotide loci and the enzyme alters the polynucleotide loci, and
[0366] the enzyme in the CRISPR complex has reduced capability of modifying one or more off-target loci as compared to an unmodified enzyme and/or whereby the enzyme in the CRISPR complex has increased capability of modifying the one or more target loci as compared to an unmodified enzyme.

[0367] In such a system, component (II) may comprise a first regulatory element operably linked to a polynucleotide sequence which comprises the guide sequence, the direct repeat sequence, and wherein component (II) may comprise a second regulatory element operably linked to a polynucleotide sequence encoding the CRISPR enzyme. In such a system, where applicable the guide RNA may comprise a chimeric RNA.

[0368] In such a system, component (I) may comprise a first regulatory element operably linked to the guide sequence and the direct repeat sequence, and wherein component (II) may comprise a second regulatory element operably linked to a polynucleotide sequence encoding the CRISPR enzyme. Such a system may comprise more than one guide RNA, and each guide RNA has a different target whereby there is multiplexing. Components (a) and (b) may be on the same vector.

[0369] In any such systems comprising vectors, the one or more vectors may comprise one or more viral vectors, such as one or more retrovirus, lentivirus, adenovirus, adeno-associated virus or herpes simplex virus.

[0370] In any such systems comprising regulatory elements, at least one of said regulatory elements may comprise a tissue-specific promoter. The tissue-specific promoter may direct expression in a mammalian blood cell, in a mammalian liver cell or in a mammalian eye.

[0371] In any of the above-described compositions or systems the direct repeat sequence, may comprise one or more protein-interacting RNA aptamers. The one or more aptamers may be located in the tetraloop. The one or more aptamers may be capable of binding MS2 bacteriophage coat protein.

[0372] In any of the above-described compositions or systems the cell may a eukaryotic cell or a prokaryotic cell; wherein the CRISPR complex is operable in the cell, and whereby the enzyme of the CRISPR complex has reduced capability of modifying one or more off-target loci of the cell as compared to an unmodified enzyme and/or whereby the enzyme in the CRISPR complex has increased capability of modifying the one or more target loci as compared to an unmodified enzyme.

[0373] The invention also provides a CRISPR complex of any of the above-described compositions or from any of the above-described systems.

[0374] The invention also provides a method of modifying a locus of interest in a cell comprising contacting the cell with any of the herein-described engineered CRISPR enzymes (e.g. engineered Cpf1), compositions or any of the herein-described systems or vector systems, or wherein the cell comprises any of the herein-described CRISPR complexes present within the cell. In such methods the cell may be a prokaryotic or eukaryotic cell, preferably a eukaryotic cell. In such methods, an organism may comprise the cell. In such methods the organism may not be a human or other animal.

[0375] Any such method may be ex vivo or in vitro.

[0376] In certain embodiments, a nucleotide sequence encoding at least one of said guide RNA or Cas protein is operably connected in the cell with a regulatory element comprising a promoter of a gene of interest, whereby expression of at least one CRISPR-Cas system component is driven by the promoter of the gene of interest. “operably connected” is intended to mean that the nucleotide sequence encoding the guide RNA and/or the Cas is linked to the regulatory element(s) in a manner that allows for expression of the nucleotide sequence, as also referred to herein elsewhere. The term “regulatory element” is also described herein elsewhere. According to the invention, the regulatory element comprises a promoter of a gene of interest, such as preferably a promoter of an endogenous gene of interest. In certain embodiments, the promoter is at its endogenous genomic location. In such embodiments, the nucleic acid encoding the CRISPR and/or Cas is under transcriptional control of the promoter of the gene of interest at its native genomic location. In certain other embodiments, the promoter is provided on a (separate) nucleic acid molecule, such as a vector or plasmid, or other extrachromosomal nucleic acid, i.e. the promoter is not provided at its native genomic location. In certain embodiments, the promoter is genomically integrated at a non-native genomic location.

[0377] Any such method, said modifying may comprise modulating gene expression. Said modulating gene expression may comprise activating gene expression and/or repressing gene expression. Accordingly, in an aspect, the invention provides in a method of modulating gene expression, wherein the method comprises introducing the engineered CRISPR protein or system as described herein into a cell.

[0378] The invention also provides a method of treating a disease, disorder or infection in an individual in need thereof comprising administering an effective amount of any of the engineered CRISPR enzymes (e.g. engineered Cpf1), compositions, systems or CRISPR complexes described herein. The disease, disorder or infection may comprise a viral infection. The viral infection may be HBV.

[0379] The invention also provides the use of any of the engineered CRISPR enzymes (e.g. engineered Cpf1), compositions, systems or CRISPR complexes described above for gene or genome editing.

[0380] The invention also provides a method of altering the expression of a genomic locus of interest in a mammalian cell comprising contacting the cell with the engineered CRISPR enzymes (e.g. engineered Cpf1), compositions, systems or CRISPR complexes described herein and thereby delivering the CRISPR-Cas (vector) and allowing the CRISPR-Cas complex to form and bind to target, and determining if the expression of the genomic locus has been altered, such as increased or decreased expression, or modification of a gene product.

[0381] The invention also provides any of the engineered CRISPR enzymes (e.g. engineered Cpf1), compositions, systems or CRISPR complexes described above for use as a therapeutic. The therapeutic may be for gene or genome editing, or gene therapy.

[0382] In certain embodiments the activity of engineered CRISPR enzymes (e.g. engineered Cpf1) as described herein comprises genomic DNA cleavage, optionally resulting in decreased transcription of a gene.

[0383] In an aspect, the invention provides in an isolated cell having altered expression of a genomic locus from the method s as described herein, wherein the altered expression is in comparison with a cell that has not been subjected to the method of altering the expression of the genomic locus. In a related aspect, the invention provides in a cell line established from such cell.

[0384] In one aspect, the invention provides a method of modifying an organism or a non-human organism by manipulation of a target sequence in a genomic locus of interest of for instance an HSC (hematopoietic stem cell), e.g., wherein the genomic locus of interest is associated with a mutation associated with an aberrant protein expression or with a disease condition or state, comprising:
[0385] delivering to an HSC, e.g., via contacting an HSC with a particle containing, a non-naturally occurring or engineered composition comprising:
   [0386] I. a CRISPR-Cas system guide RNA (gRNA) polynucleotide sequence, comprising:
      [0387] (a) a guide sequence capable of hybridizing to a target sequence in a HSC,
      [0388] (b) a direct repeat sequence, and
   [0389] II. a CRISPR enzyme, optionally comprising at least one or more nuclear localization sequences,

[0390] wherein, the guide sequence directs sequence-specific binding of a CRISPR complex to the target sequence, and

[0391] wherein the CRISPR complex comprises the CRISPR enzyme complexed with (1) the guide sequence that is hybridized to the target sequence; and

[0392] the method may optionally include also delivering a HDR template, e.g., via the particle contacting the HSC containing or contacting the HSC with another particle containing, the HDR template wherein the HDR template provides expression of a normal or less aberrant form of the protein; wherein “normal” is as to wild type, and “aberrant” can be a protein expression that gives rise to a condition or disease state; and

[0393] optionally the method may include isolating or obtaining HSC from the organism or non-human organism, optionally expanding the HSC population, performing contacting of the particle(s) with the HSC to obtain a modified HSC population, optionally expanding the population of modified HSCs, and optionally administering modified HSCs to the organism or non-human organism.

[0394] In one aspect, the invention provides a method of modifying an organism or a non-human organism by manipulation of a target sequence in a genomic locus of interest of for instance a HSC, e.g., wherein the genomic locus of interest is associated with a mutation associated with an aberrant protein expression or with a disease condition or state, comprising: delivering to an HSC, e.g., via contacting an HSC with a particle containing, a non-naturally occurring or engineered composition comprising: I. (a) a guide sequence capable of hybridizing to a target sequence in a HSC, and (b) at least one or more direct repeat sequences, and II. a CRISPR enzyme optionally having one or more NLSs, and the guide sequence directs sequence-specific binding of a CRISPR complex to the target sequence, and wherein the CRISPR complex comprises the CRISPR enzyme complexed with the guide sequence that is hybridized to the target sequence; and

[0395] the method may optionally include also delivering a HDR template, e.g., via the particle contacting the HSC containing or contacting the HSC with another particle containing, the HDR template wherein the HDR template provides expression of a normal or less aberrant form of the protein; wherein “normal” is as to wild type, and “aberrant” can be a protein expression that gives rise to a condition or disease state; and

[0396] optionally the method may include isolating or obtaining HSC from the organism or non-human organism, optionally expanding the HSC population, performing contacting of the particle(s) with the HSC to obtain a modified HSC population, optionally expanding the population of modified HSCs, and optionally administering modified HSCs to the organism or non-human organism.

[0397] The delivery can be of one or more polynucleotides encoding any one or more or all of the CRISPR-complex, advantageously linked to one or more regulatory elements for in vivo expression, e.g. via particle(s), containing a vector containing the polynucleotide(s) operably linked to the regulatory element(s). Any or all of the polynucleotide sequence encoding a CRISPR enzyme, guide sequence, direct repeat sequence, may be RNA. It will be appreciated that where reference is made to a polynucleotide, which is RNA and is said to ‘comprise’ a feature such a direct repeat sequence, the RNA sequence includes the feature. Where the polynucleotide is DNA and is said to comprise a feature such a direct repeat sequence, the DNA sequence is or can be transcribed into the RNA including the feature at issue. Where the feature is a protein, such as the CRISPR enzyme, the DNA or RNA sequence referred to is, or can be, translated (and in the case of DNA transcribed first).

[0398] In certain embodiments the invention provides a method of modifying an organism, e.g., mammal including human or a non-human mammal or organism by manipulation of a target sequence in a genomic locus of interest of an HSC e.g., wherein the genomic locus of interest is associated with a mutation associated with an aberrant protein expression or with a disease condition or state, comprising delivering, e.g., via contacting of a non-naturally occurring or engineered composition with the HSC, wherein the composition comprises one or more particles comprising viral, plasmid or nucleic acid molecule vector(s) (e.g. RNA) operably encoding a composition for expression thereof, wherein the composition comprises: (A) I. a first regulatory element operably linked to a CRISPR-Cas system RNA polynucleotide sequence, wherein the polynucleotide sequence comprises (a) a guide sequence capable of hybridizing to a target sequence in a eukaryotic cell, (b) a direct repeat sequence and II. a second regulatory element operably linked to an enzyme-coding sequence encoding a CRISPR enzyme comprising at least one or more nuclear localization sequences (or optionally at least one or more nuclear localization sequences as some embodiments can involve no NLS), wherein (a), (b) and (c) are arranged in a 5′ to 3′ orientation, wherein components I and II are located on the same or different vectors of the system, wherein when transcribed and the guide sequence directs sequence-specific binding of a CRISPR complex to the target sequence, and wherein the CRISPR complex comprises the CRISPR enzyme complexed with the guide sequence that is hybridized to the target sequence, or (B) a non-naturally occurring or engineered composition comprising a vector system comprising one or more vectors comprising I. a first regulatory element operably linked to (a) a guide sequence capable of hybridizing to a target sequence in a eukaryotic cell, and (b) at least one or more direct repeat sequences, II. a second regulatory element operably linked to an enzyme-coding sequence encoding a CRISPR enzyme, and optionally, where applicable, wherein components I, and II are located on the same or different vectors of the system, wherein when transcribed and the guide sequence directs sequence-specific binding of a CRISPR complex to the target sequence, and wherein the CRISPR complex comprises the CRISPR enzyme complexed with the guide sequence that is hybridized to the target sequence; the method may optionally include also delivering a HDR template, e.g., via the particle contacting the HSC containing or contacting the HSC with another particle containing, the HDR template wherein the HDR template provides expression of a normal or less aberrant form of the protein; wherein “normal” is as to wild type, and “aberrant” can be a protein expression that gives rise to a condition or disease state; and optionally the method may include isolating or obtaining HSC from the organism or non-human organism, optionally expanding the HSC population, performing contacting of the particle(s) with the HSC to obtain a modified HSC population, optionally expanding the population of modified HSCs, and optionally administering modified HSCs to the organism or non-human organism. In some embodiments, components I, II and III are located on the same vector. In other embodiments, components I and II are located on the same vector, while component III is located on another vector. In other embodiments, components I and III are located on the same vector, while component II is located on another vector. In other embodiments, components II and III are located on the same vector, while component I is located on another vector. In other embodiments, each of components I, II and III is located on different vectors. The invention also provides a viral or plasmid vector system as described herein.

[0399] By manipulation of a target sequence, Applicants also mean the epigenetic manipulation of a target sequence. This may be f the chromatin state of a target sequence, such as by modification of the methylation state of the target sequence (i.e. addition or removal of methylation or methylation patterns or CpG islands), histone modification, increasing or reducing accessibility to the target sequence, or by promoting 3D folding. It will be appreciated that where reference is made to a method of modifying an organism or mammal including human or a non-human mammal or organism by manipulation of a target sequence in a genomic locus of interest, this may apply to the organism (or mammal) as a whole or just a single cell or population of cells from that organism (if the organism is multicellular). In the case of humans, for instance, Applicants envisage, inter alia, a single cell or a population of cells and these may preferably be modified ex vivo and then re-introduced. In this case, a biopsy or other tissue or biological fluid sample may be necessary. Stem cells are also particularly preferred in this regard. But, of course, in vivo embodiments are also envisaged. And the invention is especially advantageous as to HSCs.

[0400] The invention in some embodiments comprehends a method of modifying an organism or a non-human organism by manipulation of a first and a second target sequence on opposite strands of a DNA duplex in a genomic locus of interest in a HSC e.g., wherein the genomic locus of interest is associated with a mutation associated with an aberrant protein expression or with a disease condition or state, comprising delivering, e.g., by contacting HSCs with particle(s) comprising a non-naturally occurring or engineered composition comprising:
[0401] I. a first CRISPR-Cas (e.g. Cpf1) system RNA polynucleotide sequence, wherein the first polynucleotide sequence comprises:
   [0402] (a) a first guide sequence capable of hybridizing to the first target sequence,
   [0403] (b) a first direct repeat sequence, and
[0404] II. a second CRISPR-Cas (e.g. Cpf1) system guide RNA polynucleotide sequence, wherein the second polynucleotide sequence comprises:
   [0405] (a) a second guide sequence capable of hybridizing to the second target sequence,
   [0406] (b) a second direct repeat sequence, and
[0407] III. a polynucleotide sequence encoding a CRISPR enzyme comprising at least one or more nuclear localization sequences and comprising one or more mutations, wherein (a), (b) and (c) are arranged in a 5′ to 3′ orientation; or
[0408] IV. expression product(s) of one or more of I. to III., e.g., the first and the second direct repeat sequence, the CRISPR enzyme;

[0409] wherein when transcribed, the first and the second guide sequence directs sequence-specific binding of a first and a second CRISPR complex to the first and second target sequences respectively, wherein the first CRISPR complex comprises the CRISPR enzyme complexed with (1) the first guide sequence that is hybridized to the first target sequence, wherein the second CRISPR complex comprises the CRISPR enzyme complexed with (1) the second guide sequence that is hybridized to the second target sequence, wherein the polynucleotide sequence encoding a CRISPR enzyme is DNA or RNA, and wherein the first guide sequence directs cleavage of one strand of the DNA duplex near the first target sequence and the second guide sequence directs cleavage of the other strand near the second target sequence inducing a double strand break, thereby modifying the organism or the non-human organism; and the method may optionally include also delivering a HDR template, e.g., via the particle contacting the HSC containing or contacting the HSC with another particle containing, the HDR template wherein the HDR template provides expression of a normal or less aberrant form of the protein; wherein “normal” is as to wild type, and “aberrant” can be a protein expression that gives rise to a condition or disease state; and optionally the method may include isolating or obtaining HSC from the organism or non-human organism, optionally expanding the HSC population, performing contacting of the particle(s) with the HSC to obtain a modified HSC population, optionally expanding the population of modified HSCs, and optionally administering modified HSCs to the organism or non-human organism. In some methods of the invention any or all of the polynucleotide sequence encoding the CRISPR enzyme, the first and the second guide sequence, the first and the second direct repeat sequence. In further embodiments of the invention the polynucleotides encoding the sequence encoding the CRISPR enzyme, the first and the second guide sequence, the first and the second direct repeat sequence, is/are RNA and are delivered via liposomes, nanoparticles, exosomes, microvesicles, or a gene-gun; but, it is advantageous that the delivery is via a particle. In certain embodiments of the invention, the first and second direct repeat sequence share 100% identity. In some embodiments, the polynucleotides may be comprised within a vector system comprising one or more vectors. In preferred embodiments, the first CRISPR enzyme has one or more mutations such that the enzyme is a complementary strand nicking enzyme, and the second CRISPR enzyme has one or more mutations such that the enzyme is a non-complementary strand nicking enzyme. Alternatively the first enzyme may be a non-complementary strand nicking enzyme, and the second enzyme may be a complementary strand nicking enzyme. In preferred methods of the invention the first guide sequence directing cleavage of one strand of the DNA duplex near the first target sequence and the second guide sequence directing cleavage of the other strand near the second target sequence results in a 5′ overhang. In embodiments of the invention the 5′ overhang is at most 200 base pairs, preferably at most 100 base pairs, or more preferably at most 50 base pairs. In embodiments of the invention the 5′ overhang is at least 26 base pairs, preferably at least 30 base pairs or more preferably 34-50 base pairs.

[0410] The invention in some embodiments comprehends a method of modifying an organism or a non-human organism by manipulation of a first and a second target sequence on opposite strands of a DNA duplex in a genomic locus of interest in for instance a HSC e.g., wherein the genomic locus of interest is associated with a mutation associated with an aberrant protein expression or with a disease condition or state, comprising delivering, e.g., by contacting HSCs with particle(s) comprising a non-naturally occurring or engineered composition comprising:
[0411] I. a first regulatory element operably linked to
   [0412] (a) a first guide sequence capable of hybridizing to the first target sequence, and
   [0413] (b) at least one or more direct repeat sequences,
[0414] II. a second regulatory element operably linked to
   [0415] (a) a second guide sequence capable of hybridizing to the second target sequence, and
   [0416] (b) at least one or more direct repeat sequences,
[0417] III. a third regulatory element operably linked to an enzyme-coding sequence encoding a CRISPR enzyme (e.g. Cpf1), and
[0418] V. expression product(s) of one or more of I. to IV., e.g., the first and the second direct repeat sequence, the CRISPR enzyme;
   wherein components I, II, III and IV are located on the same or different vectors of the system, when transcribed, and the first and the second guide sequence direct sequence-specific binding of a first and a second CRISPR complex to the first and second target sequences respectively, wherein the first CRISPR complex comprises the CRISPR enzyme complexed with (1) the first guide sequence that is hybridized to the first target sequence, wherein the second CRISPR complex comprises the CRISPR enzyme complexed with the second guide sequence that is hybridized to the second target sequence, wherein the polynucleotide sequence encoding a CRISPR enzyme is DNA or RNA, and wherein the first guide sequence directs cleavage of one strand of the DNA duplex near the first target sequence and the second guide sequence directs cleavage of the other strand near the second target sequence inducing a double strand break, thereby modifying the organism or the non-human organism; and the method may optionally include also delivering a HDR template, e.g., via the particle contacting the HSC containing or contacting the HSC with another particle containing, the HDR template wherein the HDR template provides expression of a normal or less aberrant form of the protein; wherein “normal” is as to wild type, and “aberrant” can be a protein expression that gives rise to a condition or disease state; and optionally the method may include isolating or obtaining HSC from the organism or non-human organism, optionally expanding the HSC population, performing contacting of the particle(s) with the HSC to obtain a modified HSC population, optionally expanding the population of modified HSCs, and optionally administering modified HSCs to the organism or non-human organism.

[0419] The invention also provides a vector system as described herein. The system may comprise one, two, three or four different vectors. Components I, II, III and IV may thus be located on one, two, three or four different vectors, and all combinations for possible locations of the components are herein envisaged, for example: components I, II, III and IV can be located on the same vector; components I, II, III and IV can each be located on different vectors; components I, II, III and IV may be located on a total of two or three different vectors, with all combinations of locations envisaged, etc. In some methods of the invention any or all of the polynucleotide sequence encoding the CRISPR enzyme, the first and the second guide sequence, the first and the second direct repeat sequence is/are RNA. In further embodiments of the invention the first and second direct repeat sequence share 100% identity. In preferred embodiments, the first CRISPR enzyme has one or more mutations such that the enzyme is a complementary strand nicking enzyme, and the second CRISPR enzyme has one or more mutations such that the enzyme is a non-complementary strand nicking enzyme. Alternatively the first enzyme may be a non-complementary strand nicking enzyme, and the second enzyme may be a complementary strand nicking enzyme. In a further embodiment of the invention, one or more of the viral vectors are delivered via liposomes, nanoparticles, exosomes, microvesicles, or a gene-gun; but, particle delivery is advantageous.

[0420] In preferred methods of the invention the first guide sequence directing cleavage of one strand of the DNA duplex near the first target sequence and the second guide sequence directing cleavage of other strand near the second target sequence results in a 5′ overhang. In embodiments of the invention the 5′ overhang is at most 200 base pairs, preferably at most 100 base pairs, or more preferably at most 50 base pairs. In embodiments of the invention the 5′ overhang is at least 26 base pairs, preferably at least 30 base pairs or more preferably 34-50 base pairs.

[0421] The invention in some embodiments comprehends a method of modifying a genomic locus of interest in for instance HSC e.g., wherein the genomic locus of interest is associated with a mutation associated with an aberrant protein expression or with a disease condition or state, by introducing into the HSC, e.g., by contacting HSCs with particle(s) comprising, a Cas protein having one or more mutations and two guide RNAs that target a first strand and a second strand of the DNA molecule respectively in the HSC, whereby the guide RNAs target the DNA molecule and the Cas protein nicks each of the first strand and the second strand of the DNA molecule, whereby a target in the HSC is altered; and, wherein the Cas protein and the two guide RNAs do not naturally occur together and the method may optionally include also delivering a HDR template, e.g., via the particle contacting the HSC containing or contacting the HSC with another particle containing, the HDR template wherein the HDR template provides expression of a normal or less aberrant form of the protein; wherein “normal” is as to wild type, and “aberrant” can be a protein expression that gives rise to a condition or disease state; and optionally the method may include isolating or obtaining HSC from the organism or non-human organism, optionally expanding the HSC population, performing contacting of the particle(s) with the HSC to obtain a modified HSC population, optionally expanding the population of modified HSCs, and optionally administering modified HSCs to the organism or non-human organism. In preferred methods of the invention the Cas protein nicking each of the first strand and the second strand of the DNA molecule results in a 5′ overhang. In embodiments of the invention the 5′ overhang is at most 200 base pairs, preferably at most 100 base pairs, or more preferably at most 50 base pairs. In embodiments of the invention the 5′ overhang is at least 26 base pairs, preferably at least 30 base pairs or more preferably 34-50 base pairs. In an aspect of the invention the Cas protein is codon optimized for expression in a eukaryotic cell, preferably a mammalian cell or a human cell. Aspects of the invention relate to the expression of a gene product being decreased or a template polynucleotide being further introduced into the DNA molecule encoding the gene product or an intervening sequence being excised precisely by allowing the two 5′ overhangs to reanneal and ligate or the activity or function of the gene product being altered or the expression of the gene product being increased. In an embodiment of the invention, the gene product is a protein.

[0422] The invention in some embodiments comprehends a method of modifying a genomic locus of interest in for instance HSC e.g., wherein the genomic locus of interest is associated with a mutation associated with an aberrant protein expression or with a disease condition or state, by introducing into the HSC, e.g., by contacting HSCs with particle(s) comprising,
[0423] a) a first regulatory element operably linked to each of two CRISPR-Cas system guide RNAs that target a first strand and a second strand respectively of a double stranded DNA molecule of the HSC, and
[0424] b) a second regulatory element operably linked to a Cas (e.g. Cpf1) protein, or
[0425] c) expression product(s) of a) or b),
   wherein components (a) and (b) are located on same or different vectors of the system, whereby the guide RNAs target the DNA molecule of the HSC and the Cas protein nicks each of the first strand and the second strand of the DNA molecule of the HSC; and, wherein the Cas protein and the two guide RNAs do not naturally occur together; and the method may optionally include also delivering a HDR template, e.g., via the particle contacting the HSC containing or contacting the HSC with another particle containing, the HDR template wherein the HDR template provides expression of a normal or less aberrant form of the protein; wherein “normal” is as to wild type, and “aberrant” can be a protein expression that gives rise to a condition or disease state; and optionally the method may include isolating or obtaining HSC from the organism or non-human organism, optionally expanding the HSC population, performing contacting of the particle(s) with the HSC to obtain a modified HSC population, optionally expanding the population of modified HSCs, and optionally administering modified HSCs to the organism or non-human organism. In aspects of the invention the guide RNAs may comprise a guide sequence fused to a direct repeat sequence. Aspects of the invention relate to the expression of a gene product being decreased or a template polynucleotide being further introduced into the DNA molecule encoding the gene product or an intervening sequence being excised precisely by allowing the two 5′ overhangs to reanneal and ligate or the activity or function of the gene product being altered or the expression of the gene product being increased. In an embodiment of the invention, the gene product is a protein. In preferred embodiments of the invention the vectors of the system are viral vectors. In a further embodiment, the vectors of the system are delivered via liposomes, nanoparticles, exosomes, microvesicles, or a gene-gun; and particles are preferred. In one aspect, the invention provides a method of modifying a target polynucleotide in a HSC. In some embodiments, the method comprises allowing a CRISPR complex to bind to the target polynucleotide to effect cleavage of said target polynucleotide thereby modifying the target polynucleotide, wherein the CRISPR complex comprises a CRISPR enzyme complexed with a guide sequence hybridized to a target sequence within said target polynucleotide, wherein said guide sequence is linked to a direct repeat sequence. In some embodiments, said cleavage comprises cleaving one or two strands at the location of the target sequence by said CRISPR enzyme. In some embodiments, said cleavage results in decreased transcription of a target gene. In some embodiments, the method further comprises repairing said cleaved target polynucleotide by homologous recombination with an exogenous template polynucleotide, wherein said repair results in a mutation comprising an insertion, deletion, or substitution of one or more nucleotides of said target polynucleotide. In some embodiments, said mutation results in one or more amino acid changes in a protein expressed from a gene comprising the target sequence. In some embodiments, the method further comprises delivering one or more vectors or expression product(s) thereof, e.g., via particle(s), to for instance said HSC, wherein the one or more vectors drive expression of one or more of: the CRISPR enzyme, the guide sequence linked to the direct repeat sequence. In some embodiments, said vectors are delivered to for instance the HSC in a subject. In some embodiments, said modifying takes place in said HSC in a cell culture. In some embodiments, the method further comprises isolating said HSC from a subject prior to said modifying. In some embodiments, the method further comprises returning said HSC and/or cells derived therefrom to said subject.

[0426] In one aspect, the invention provides a method of generating for instance a HSC comprising a mutated disease gene. In some embodiments, a disease gene is any gene associated with an increase in the risk of having or developing a disease. In some embodiments, the method comprises (a) introducing one or more vectors or expression product(s) thereof, e.g., via particle(s), into a HSC, wherein the one or more vectors drive expression of one or more of: a CRISPR enzyme, a guide sequence linked to a direct repeat sequence; and (b) allowing a CRISPR complex to bind to a target polynucleotide to effect cleavage of the target polynucleotide within said disease gene, wherein the CRISPR complex comprises the CRISPR enzyme complexed with the guide sequence that is hybridized to the target sequence within the target polynucleotide, and optionally, where applicable, thereby generating a HSC comprising a mutated disease gene. In some embodiments, said cleavage comprises cleaving one or two strands at the location of the target sequence by said CRISPR enzyme. In some embodiments, said cleavage results in decreased transcription of a target gene. In some embodiments, the method further comprises repairing said cleaved target polynucleotide by homologous recombination with an exogenous template polynucleotide, wherein said repair results in a mutation comprising an insertion, deletion, or substitution of one or more nucleotides of said target polynucleotide. In some embodiments, said mutation results in one or more amino acid changes in a protein expression from a gene comprising the target sequence. In some embodiments the modified HSC is administered to an animal to thereby generate an animal model.

[0427] In one aspect, the invention provides for methods of modifying a target polynucleotide in for instance a HSC. In some embodiments, the method comprises allowing a CRISPR complex to bind to the target polynucleotide to effect cleavage of said target polynucleotide thereby modifying the target polynucleotide, wherein the CRISPR complex comprises a CRISPR enzyme complexed with a guide sequence hybridized to a target sequence within said target polynucleotide, wherein said guide sequence is linked to a direct repeat sequence. In other embodiments, this invention provides a method of modifying expression of a polynucleotide in a eukaryotic cell that arises from for instance an HSC. The method comprises increasing or decreasing expression of a target polynucleotide by using a CRISPR complex that binds to the polynucleotide in the HSC; advantageously the CRISPR complex is delivered via particle(s).

[0428] In some methods, a target polynucleotide can be inactivated to effect the modification of the expression in for instance an HSC. For example, upon the binding of a CRISPR complex to a target sequence in a cell, the target polynucleotide is inactivated such that the sequence is not transcribed, the coded protein is not produced, or the sequence does not function as the wild-type sequence does.

[0429] In some embodiments the RNA of the CRISPR-Cas system, e.g., the guide or gRNA, can be modified; for instance to include an aptamer or a functional domain. An aptamer is a synthetic oligonucleotide that binds to a specific target molecule; for instance a nucleic acid molecule that has been engineered through repeated rounds of in vitro selection or SELEX (systematic evolution of ligands by exponential enrichment) to bind to various molecular targets such as small molecules, proteins, nucleic acids, and even cells, tissues and organisms. Aptamers are useful in that they offer molecular recognition properties that rival that of antibodies. In addition to their discriminate recognition, aptamers offer advantages over antibodies including that they elicit little or no immunogenicity in therapeutic applications. Accordingly, in the practice of the invention, either or both of the enzyme or the RNA can include a functional domain.

[0430] In some embodiments, the functional domain is a transcriptional activation domain, preferably VP64. In some embodiments, the functional domain is a transcription repression domain, preferably KRAB. In some embodiments, the transcription repression domain is SID, or concatemers of SID (eg SID4X). In some embodiments, the functional domain is an epigenetic modifying domain, such that an epigenetic modifying enzyme is provided. In some embodiments, the functional domain is an activation domain, which may be the P65 activation domain. In some embodiments, the functional domain comprises nuclease activity. In one such embodiment, the functional domain comprises Fok1.

[0431] The invention also provides an in vitro or ex vivo cell comprising any of the modified CRISPR enzymes, compositions, systems or complexes described above, or from any of the methods described above. The cell may be a eukaryotic cell or a prokaryotic cell. The invention also provides progeny of such cells. The invention also provides a product of any such cell or of any such progeny, wherein the product is a product of the said one or more target loci as modified by the modified CRISPR enzyme of the CRISPR complex. The product may be a peptide, polypeptide or protein. Some such products may be modified by the modified CRISPR enzyme of the CRISPR complex. In some such modified products, the product of the target locus is physically distinct from the product of the said target locus which has not been modified by the said modified CRISPR enzyme.

[0432] The invention also provides a polynucleotide molecule comprising a polynucleotide sequence encoding any of the non-naturally-occurring CRISPR enzymes described above.

[0433] Any such polynucleotide may further comprise one or more regulatory elements which are operably linked to the polynucleotide sequence encoding the non-naturally-occurring CRISPR enzyme.

[0434] In any such polynucleotide which comprises one or more regulatory elements, the one or more regulatory elements may be operably configured for expression of the non-naturally-occurring CRISPR enzyme in a eukaryotic cell. The eukaryotic cell may be a human cell. The eukaryotic cell may be a rodent cell, optionally a mouse cell. The eukaryotic cell may be a yeast cell. The eukaryotic cell may be a chinese hamster ovary (CHO) cell. The eukaryotic cell may be an insect cell.

[0435] In any such polynucleotide which comprises one or more regulatory elements, the one or more regulatory elements may be operably configured for expression of the non-naturally-occurring CRISPR enzyme in a prokaryotic cell.

[0436] In any such polynucleotide which comprises one or more regulatory elements, the one or more regulatory elements may operably configured for expression of the non-naturally-occurring CRISPR enzyme in an in vitro system.

[0437] The invention also provides an expression vector comprising any of the above-described polynucleotide molecules. The invention also provides such polynucleotide molecule(s), for instance such polynucleotide molecules operably configured to express the protein and/or the nucleic acid component(s), as well as such vector(s).

[0438] The invention further provides for a method of making mutations to a Cas (e.g. Cpf1) or a mutated or modified Cas (e.g. Cpf1) that is an ortholog of the CRISPR enzymes according to the invention as described herein, comprising ascertaining amino acid(s) in that ortholog may be in close proximity or may touch a nucleic acid molecule, e.g., DNA, RNA, gRNA, etc., and/or amino acid(s) analogous or corresponding to herein-identified amino acid(s) in CRISPR enzymes according to the invention as described herein for modification and/or mutation, and synthesizing or preparing or expressing the orthologue comprising, consisting of or consisting essentially of modification(s) and/or mutation(s) or mutating as herein-discussed, e.g., modifying, e.g., changing or mutating, a neutral amino acid to a charged, e.g., positively charged, amino acid, e.g., Alanine. The so modified ortholog can be used in CRISPR-Cas systems; and nucleic acid molecule(s) expressing it may be used in vector or other delivery systems that deliver molecules or encoding CRISPR-Cas system components as herein-discussed.

[0439] In an aspect, the invention provides efficient on-target activity and minimizes off target activity. In an aspect, the invention provides efficient on-target cleavage by a CRISPR protein and minimizes off-target cleavage by the CRISPR protein. In an aspect, the invention provides guide specific binding of a CRISPR protein at a gene locus without DNA cleavage. In an aspect, the invention provides efficient guide directed on-target binding of a CRISPR protein at a gene locus and minimizes off-target binding of the CRISPR protein. Accordingly, in an aspect, the invention provides target-specific gene regulation. In an aspect, the invention provides guide specific binding of a CRISPR enzyme at a gene locus without DNA cleavage. Accordingly, in an aspect, the invention provides for cleavage at one gene locus and gene regulation at a different gene locus using a single CRISPR enzyme. In an aspect, the invention provides orthogonal activation and/or inhibition and/or cleavage of multiple targets using one or more CRISPR protein and/or enzyme.

[0440] In another aspect, the present invention provides for a method of functional screening of genes in a genome in a pool of cells ex vivo or in vivo comprising the administration or expression of a library comprising a plurality of CRISPR-Cas system guide RNAs (gRNAs) and wherein the screening further comprises use of a CRISPR enzyme, wherein the CRISPR complex is modified to comprise a heterologous functional domain. In an aspect the invention provides a method for screening a genome comprising the administration to a host or expression in a host in vivo of a library. In an aspect the invention provides a method as herein discussed further comprising an activator administered to the host or expressed in the host. In an aspect the invention provides a method as herein discussed wherein the activator is attached to a CRISPR protein. In an aspect the invention provides a method as herein discussed wherein the activator is attached to the N terminus or the C terminus of the CRISPR protein. In an aspect the invention provides a method as herein discussed wherein the activator is attached to a gRNA loop. In an aspect the invention provides a method as herein discussed further comprising a repressor administered to the host or expressed in the host. In an aspect the invention provides a method as herein discussed wherein the screening comprises affecting and detecting gene activation, gene inhibition, or cleavage in the locus.

[0441] In an aspect the invention provides a method as herein discussed wherein the host is a eukaryotic cell. In an aspect the invention provides a method as herein discussed wherein the host is a mammalian cell. In an aspect the invention provides a method as herein discussed, wherein the host is a non-human eukaryote cell. In an aspect the invention provides a method as herein discussed, wherein the non-human eukaryote cell is a non-human mammal cell. In an aspect the invention provides a method as herein discussed, wherein the non-human mammal cell may be including, but not limited to, primate bovine, ovine, procine, canine, rodent, Leporidae such as monkey, cow, sheep, pig, dog, rabbit, rat or mouse cell. In an aspect the invention provides a method as herein discussed, the cell may be a non-mammalian eukaryotic cell such as poultry bird (e.g., chicken), vertebrate fish (e.g., salmon) or shellfish (e.g., oyster, claim, lobster, shrimp) cell. In an aspect the invention provides a method as herein discussed, the non-human eukaryote cell is a plant cell. The plant cell may be of a monocot or dicot or of a crop or grain plant such as cassava, corn, sorghum, soybean, wheat, oat or rice. The plant cell may also be of an algae, tree or production plant, fruit or vegetable (e.g., trees such as citrus trees, e.g., orange, grapefruit or lemon trees; peach or nectarine trees; apple or pear trees; nut trees such as almond or walnut or pistachio trees; nightshade plants; plants of the genus Brassica; plants of the genus Lactuca; plants of the genus Spinacia; plants of the genus Capsicum; cotton, tobacco, asparagus, carrot, cabbage, broccoli, cauliflower, tomato, eggplant, pepper, lettuce, spinach, strawberry, blueberry, raspberry, blackberry, grape, coffee, cocoa, etc).

[0442] In an aspect the invention provides a method as herein discussed comprising the delivery of the CRISPR-Cas complexes or component(s) thereof or nucleic acid molecule(s) coding therefor, wherein said nucleic acid molecule(s) are operatively linked to regulatory sequence(s) and expressed in vivo. In an aspect the invention provides a method as herein discussed wherein the expressing in vivo is via a lentivirus, an adenovirus, or an AAV. In an aspect the invention provides a method as herein discussed wherein the delivery is via a particle, a nanoparticle, a lipid or a cell penetrating peptide (CPP).

[0443] In particular embodiments it can be of interest to target the CRISPR-Cas complex to the chloroplast. In many cases, this targeting may be achieved by the presence of an N-terminal extension, called a chloroplast transit peptide (CTP) or plastid transit peptide. Chromosomal transgenes from bacterial sources must have a sequence encoding a CTP sequence fused to a sequence encoding an expressed polypeptide if the expressed polypeptide is to be compartmentalized in the plant plastid (e.g. chloroplast). Accordingly, localization of an exogenous polypeptide to a chloroplast is often 1 accomplished by means of operably linking a polynucleotide sequence encoding a CTP sequence to the 5′ region of a polynucleotide encoding the exogenous polypeptide. The CTP is removed in a processing step during translocation into the plastid. Processing efficiency may, however, be affected by the amino acid sequence of the CTP and nearby sequences at the NH 2 terminus of the peptide. Other options for targeting to the chloroplast which have been described are the maize cab-m7 signal sequence (U.S. Pat. No. 7,022,896, WO 97/41228) a pea glutathione reductase signal sequence (WO 97/41228) and the CTP described in US2009029861.

[0444] In an aspect the invention provides a pair of CRISPR-Cas complexes, each comprising a guide RNA (gRNA) comprising a guide sequence capable of hybridizing to a target sequence in a genomic locus of interest in a cell, wherein at least one loop of each sgRNA is modified by the insertion of distinct RNA sequence(s) that bind to one or more adaptor proteins, and wherein the adaptor protein is associated with one or more functional domains, wherein each gRNA of each CRISPR-Cas comprises a functional domain having a DNA cleavage activity. In an aspect the invention provides a paired CRISPR-Cas complexes as herein-discussed, wherein the DNA cleavage activity is due to a Fok1 nuclease.

[0445] In an aspect the invention provides a method for cutting a target sequence in a genomic locus of interest comprising delivery to a cell of the CRISPR-Cas complexes or component(s) thereof or nucleic acid molecule(s) coding therefor, wherein said nucleic acid molecule(s) are operatively linked to regulatory sequence(s) and expressed in vivo. In an aspect the invention provides a method as herein-discussed wherein the delivery is via a lentivirus, an adenovirus, or an AAV. In an aspect the invention provides a method as herein-discussed or paired CRISPR-Cas complexes as herein-discussed wherein the target sequence for a first complex of the pair is on a first strand of double stranded DNA and the target sequence for a second complex of the pair is on a second strand of double stranded DNA. In an aspect the invention provides a method as herein-discussed or paired CRISPR-Cas complexes as herein-discussed wherein the target sequences of the first and second complexes are in proximity to each other such that the DNA is cut in a manner that facilitates homology directed repair. In an aspect a herein method can further include introducing into the cell template DNA. In an aspect a herein method or herein paired CRISPR-Cas complexes can involve wherein each CRISPR-Cas complex has a CRISPR enzyme that is mutated such that it has no more than about 5% of the nuclease activity of the CRISPR enzyme that is not mutated.

[0446] In an aspect the invention provides a library, method or complex as herein-discussed wherein the gRNA is modified to have at least one non-coding functional loop, e.g., wherein the at least one non-coding functional loop is repressive; for instance, wherein the at least one non-coding functional loop comprises Alu.

[0447] In one aspect, the invention provides a method for altering or modifying expression of a gene product. The said method may comprise introducing into a cell containing and expressing a DNA molecule encoding the gene product an engineered, non-naturally occurring CRISPR-Cas system comprising a Cas protein and guide RNA that targets the DNA molecule, whereby the guide RNA targets the DNA molecule encoding the gene product and the Cas protein cleaves the DNA molecule encoding the gene product, whereby expression of the gene product is altered; and, wherein the Cas protein and the guide RNA do not naturally occur together. The invention further comprehends the Cas protein being codon optimized for expression in a Eukaryotic cell. In a preferred embodiment the Eukaryotic cell is a mammalian cell and in a more preferred embodiment the mammalian cell is a human cell. In a further embodiment of the invention, the expression of the gene product is decreased.

[0448] In an aspect, the invention provides altered cells and progeny of those cells, as well as products made by the cells. CRISPR-Cas (e.g. Cpf1) proteins and systems of the invention are used to produce cells comprising a modified target locus. In some embodiments, the method may comprise allowing a nucleic acid-targeting complex to bind to the target DNA or RNA to effect cleavage of said target DNA or RNA thereby modifying the target DNA or RNA, wherein the nucleic acid-targeting complex comprises a nucleic acid-targeting effector protein complexed with a guide RNA hybridized to a target sequence within said target DNA or RNA. In one aspect, the invention provides a method of repairing a genetic locus in a cell. In another aspect, the invention provides a method of modifying expression of DNA or RNA in a eukaryotic cell. In some embodiments, the method comprises allowing a nucleic acid-targeting complex to bind to the DNA or RNA such that said binding results in increased or decreased expression of said DNA or RNA; wherein the nucleic acid-targeting complex comprises a nucleic acid-targeting effector protein complexed with a guide RNA. Similar considerations and conditions apply as above for methods of modifying a target DNA or RNA. In fact, these sampling, culturing and re-introduction options apply across the aspects of the present invention. In an aspect, the invention provides for methods of modifying a target DNA or RNA in a eukaryotic cell, which may be in vivo, ex vivo or in vitro. In some embodiments, the method comprises sampling a cell or population of cells from a human or non-human animal, and modifying the cell or cells. Culturing may occur at any stage ex vivo. Such cells can be, without limitation, plant cells, animal cells, particular cell types of any organism, including stem cells, immune cells, T cell, B cells, dendritic cells, cardiovascular cells, epithelial cells, stem cells and the like. The cells can be modified according to the invention to produce gene products, for example in controlled amounts, which may be increased or decreased, depending on use, and/or mutated. In certain embodiments, a genetic locus of the cell is repaired. The cell or cells may even be re-introduced into the non-human animal or plant. For re-introduced cells it may be preferred that the cells are stem cells.

[0449] In an aspect, the invention provides cells which transiently comprise CRISPR systems, or components. For example, CRISPR proteins or enzymes and nucleic acids are transiently provided to a cell and a genetic locus is altered, followed by a decline in the amount of one or more components of the CRISPR system. Subsequently, the cells, progeny of the cells, and organisms which comprise the cells, having acquired a CRISPR mediated genetic alteration, comprise a diminished amount of one or more CRISPR system components, or no longer contain the one or more CRISPR system components. One non-limiting example is a self-inactivating CRISPR-Cas system such as further described herein. Thus, the invention provides cells, and organisms, and progeny of the cells and organisms which comprise one or more CRISPR-Cas system-altered genetic loci, but essentially lack one or more CRISPR system component. In certain embodiments, the CRISPR system components are substantially absent. Such cells, tissues and organisms advantageously comprise a desired or selected genetic alteration but have lost CRISPR-Cas components or remnants thereof that potentially might act non-specifically, lead to questions of safety, or hinder regulatory approval. As well, the invention provides products made by the cells, organisms, and progeny of the cells and organisms.

### Inducible Cpf1 CRISPR-Cas Systems (“Split-Cpf1”)

[0450] In an aspect the invention provides a non-naturally occurring or engineered inducible Cpf1 CRISPR-Cas system, comprising:

a first Cpf1 fusion construct attached to a first half of an inducible dimer and
a second Cpf1 fusion construct attached to a second half of the inducible dimer,

[0451] wherein the first Cpf1 fusion construct is operably linked to one or more nuclear localization signals,

[0452] wherein the second Cpf1 fusion construct is operably linked to one or more nuclear export signals,

[0453] wherein contact with an inducer energy source brings the first and second halves of the inducible dimer together,

[0454] wherein bringing the first and second halves of the inducible dimer together allows the first and second Cpf1 fusion constructs to constitute a functional Cpf1 CRISPR-Cas system,

[0455] wherein the Cpf1 CRISPR-Cas system comprises a guide RNA (gRNA) comprising a guide sequence capable of hybridizing to a target sequence in a genomic locus of interest in a cell, and

[0456] wherein the functional Cpf1 CRISPR-Cas system binds to the target sequence and, optionally, edits the genomic locus to alter gene expression.

[0457] In an aspect of the invention in the inducible Cpf1 CRISPR-Cas system, the inducible dimer is or comprises or consists essentially of or consists of an inducible heterodimer. In an aspect, in inducible Cpf1 CRISPR-Cas system, the first half or a first portion or a first fragment of the inducible heterodimer is or comprises or consists of or consists essentially of an FKBP, optionally FKBP12. In an aspect of the invention, in the inducible Cpf1 CRISPR-Cas system, the second half or a second portion or a second fragment of the inducible heterodimer is or comprises or consists of or consists essentially of FRB. In an aspect of the invention, in the inducible Cpf1 CRISPR-Cas system, the arrangement of the first Cpf1 fusion construct is or comprises or consists of or consists essentially of N′ terminal Cpf1 part-FRB-NES. In an aspect of the invention, in the inducible Cpf1 CRISPR-Cas system, the arrangement of the first Cpf1 fusion construct is or comprises or consists of or consists essentially of NES-N′ terminal Cpf1 part-FRB-NES. In an aspect of the invention, in the inducible Cpf1 CRISPR-Cas system, the arrangement of the second Cpf1 fusion construct is or comprises or consists essentially of or consists of C′ terminal Cpf1 part-FKBP-NLS. In an aspect the invention provides in the inducible Cpf1 CRISPR-Cas system, the arrangement of the second Cpf1 fusion construct is or comprises or consists of or consists essentially of NLS-C′ terminal Cpf1 part-FKBP-NLS. In an aspect, in inducible Cpf1 CRISPR-Cas system there can be a linker that separates the Cpf1 part from the half or portion or fragment of the inducible dimer. In an aspect, in the inducible Cpf1 CRISPR-Cas system, the inducer energy source is or comprises or consists essentially of or consists of rapamycin. In an aspect, in inducible Cpf1 CRISPR-Cas system, the inducible dimer is an inducible homodimer. In an aspect, in inducible Cpf1 CRISPR-Cas system, the Cpf1 is FnCpf1. In an aspect, in the inducible Cpf1 CRISPR-Cas system, one or more functional domains are associated with one or both parts of the Cpf1, e.g., the functional domains optionally including a transcriptional activator, a transcriptional or a nuclease such as a Fok1 nuclease. In an aspect, in the inducible Cpf1 CRISPR-Cas system, the functional Cpf1 CRISPR-Cas system binds to the target sequence and the enzyme is a dead-Cpf1, optionally having a diminished nuclease activity of at least 97%, or 100% (or no more than 3% and advantageously 0% nuclease activity) as compared with the Cpf1 not having the at least one mutation. The invention further comprehends and an aspect of the invention provides, a polynucleotide encoding the inducible Cpf1 CRISPR-Cas system as herein discussed.

[0458] In an aspect, the invention provides a vector for delivery of the first Cpf1 fusion construct, attached to a first half or portion or fragment of an inducible dimer and operably linked to one or more nuclear localization signals, according as herein discussed. In an aspect, the invention provides a vector for delivery of the second Cpf1 fusion construct, attached to a second half or portion or fragment of an inducible dimer and operably linked to one or more nuclear export signals.

[0459] In an aspect, the invention provides a vector for delivery of both: the first Cpf1 fusion construct, attached to a first half or portion or fragment of an inducible dimer and operably linked to one or more nuclear localization signals, as herein discussed; and the second Cpf1 fusion construct, attached to a second half or portion or fragment of an inducible dimer and operably linked to one or more nuclear export signals, as herein discussed.

[0460] In an aspect, the vector can be single plasmid or expression cassette.

[0461] The invention, in an aspect, provides a eukaryotic host cell or cell line transformed with any of the vectors herein discussed or expressing the inducible Cpf1 CRISPR-Cas system as herein discussed.

[0462] The invention, in an aspect provides, a transgenic organism transformed with any of the vectors herein discussed or expressing the inducible Cpf1 CRISPR-Cas system herein discussed, or the progeny thereof. In an aspect, the invention provides a model organism which constitutively expresses the inducible Cpf1 CRISPR-Cas system as herein discussed.

[0463] In an aspect, the invention provides non-naturally occurring or engineered inducible Cpf1 CRISPR-Cas system, comprising:

a first Cpf1 fusion construct attached to a first half of an inducible heterodimer and
a second Cpf1 fusion construct attached to a second half of the inducible heterodimer,

[0464] wherein the first Cpf1 fusion construct is operably linked to one or more nuclear localization signals,

[0465] wherein the second CPf1 fusion construct is operably linked to a nuclear export signal,

[0466] wherein contact with an inducer energy source brings the first and second halves of the inducible heterodimer together,

[0467] wherein bringing the first and second halves of the inducible heterodimer together allows the first and second Cpf1 fusion constructs to constitute a functional Cpf1 CRISPR-Cas system,

[0468] wherein the Cpf1 CRISPR-Cas system comprises a guide RNA (gRNA) comprising a guide sequence capable of hybridizing to a target sequence in a genomic locus of interest in a cell, and

[0469] wherein the functional Cpf1 CRISPR-Cas system edits the genomic locus to alter gene expression.

[0470] In an aspect, the invention provides a method of treating a subject in need thereof, comprising inducing gene editing by transforming the subject with the polynucleotide as herein discussed or any of the vectors herein discussed and administering an inducer energy source to the subject. The invention comprehends uses of such a polynucleotide or vector in the manufacture of a medicament, e.g., such a medicament for treating a subject or for such a method of treating a subject. The invention comprehends the polynucleotide as herein discussed or any of the vectors herein discussed for use in a method of treating a subject in need thereof comprising inducing gene editing, wherein the method further comprises administering an inducer energy source to the subject. In an aspect, in the method, a repair template is also provided, for example delivered by a vector comprising said repair template.

[0471] The invention also provides a method of treating a subject in need thereof, comprising inducing transcriptional activation or repression by transforming the subject with the polynucleotide herein discussed or any of the vectors herein discussed, wherein said polynucleotide or vector encodes or comprises the catalytically inactive Cpf1 and one or more associated functional domains as herein discussed; the method further comprising administering an inducer energy source to the subject. The invention also provides the polynucleotide herein discussed or any of the vectors herein discussed for use in a method of treating a subject in need thereof comprising inducing transcriptional activation or repression, wherein the method further comprises administering an inducer energy source to the subject.

[0472] Accordingly, the invention comprehends inter alia homodimers as well as heterodimers, dead-Cpf1 or Cpf1 having essentially no nuclease activity, e.g., through mutation, systems or complexes wherein there is one or more NLS and/or one or more NES; functional domain(s) linked to split Cpf1; methods, including methods of treatment, and uses.

[0473] It will be appreciated that where reference is made herein to Cpf1, Cpf1 protein or Cpf1 enzyme, this includes the present split Cpf1. In one aspect, the invention provides a method for altering or modifying expression of a gene product. The said method may comprise introducing into a cell containing and expressing a DNA molecule encoding the gene product an engineered, non-naturally occurring Cpf1 CRISPR-Cas system comprising a Cpf1 protein and guide RNA that targets the DNA molecule, whereby the guide RNA targets the DNA molecule encoding the gene product and the Cpf1 protein cleaves the DNA molecule encoding the gene product, whereby expression of the gene product is altered; and, wherein the Cpf1 protein and the guide RNA do not naturally occur together. The invention comprehends the guide RNA comprising a guide sequence linked to a direct repeat (DR) sequence. The invention further comprehends the Cpf1 protein being codon optimized for expression in a eukaryotic cell. In a preferred embodiment the eukaryotic cell is a mammalian cell and in a more preferred embodiment the mammalian cell is a human cell. In a further embodiment of the invention, the expression of the gene product is decreased.

[0474] In one aspect, the invention provides an engineered, non-naturally occurring Cpf1 CRISPR-Cas system comprising a Cpf1 protein and a guide RNA that targets a DNA molecule encoding a gene product in a cell, whereby the guide RNA targets the DNA molecule encoding the gene product and the Cpf1 protein cleaves the DNA molecule encoding the gene product, whereby expression of the gene product is altered; and, wherein the Cpf1 protein and the guide RNA do not naturally occur together; this including the present split Cpf1. The invention comprehends the guide RNA comprising a guide sequence linked to a DR sequence. The invention further comprehends the Cpf1 protein being codon optimized for expression in a eukaryotic cell. In a preferred embodiment the eukaryotic cell is a mammalian cell and in a more preferred embodiment the mammalian cell is a human cell. In a further embodiment of the invention, the expression of the gene product is decreased.

[0475] In another aspect, the invention provides an engineered, non-naturally occurring vector system comprising one or more vectors comprising a first regulatory element operably linked to a Cpf1 CRISPR-Cas system guide RNA that targets a DNA molecule encoding a gene product and a second regulatory element operably linked to a Cpf1 protein; this includes the present split Cpf1. Components (a) and (b) may be located on same or different vectors of the system. The guide RNA targets the DNA molecule encoding the gene product in a cell and the Cpf1 protein cleaves the DNA molecule encoding the gene product, whereby expression of the gene product is altered; and, wherein the Cpf1 protein and the guide RNA do not naturally occur together. The invention comprehends the guide RNA comprising a guide sequence linked to a DR sequence. The invention further comprehends the Cpf1 protein being codon optimized for expression in a eukaryotic cell. In a preferred embodiment the eukaryotic cell is a mammalian cell and in a more preferred embodiment the mammalian cell is a human cell. In a further embodiment of the invention, the expression of the gene product is decreased.

[0476] In one aspect, the invention provides a vector system comprising one or more vectors. In some embodiments, the system comprises: (a) a first regulatory element operably linked to a DR sequence and one or more insertion sites for inserting one or more guide sequences downstream of the DR sequence, wherein when expressed, the guide sequence directs sequence-specific binding of a Cpf1 CRISPR-Cas complex to a target sequence in a eukaryotic cell, wherein the Cpf1 CRISPR-Cas complex comprises Cpf1 complexed with (1) the guide sequence that is hybridized to the target sequence, and (2) the DR sequence; and (b) a second regulatory element operably linked to an enzyme-coding sequence encoding said Cpf1 enzyme comprising a nuclear localization sequence; wherein components (a) and (b) are located on the same or different vectors of the system; this includes the present split Cpf1. In some embodiments, component (a) further comprises two or more guide sequences operably linked to the first regulatory element, wherein when expressed, each of the two or more guide sequences direct sequence specific binding of a Cpf1 CRISPR-Cas complex to a different target sequence in a eukaryotic cell.

[0477] In some embodiments, the Cpf1 CRISPR-Cas complex comprises one or more nuclear localization sequences of sufficient strength to drive accumulation of said Cpf1 CRISPR-Cas complex in a detectable amount in the nucleus of a eukaryotic cell. Without wishing to be bound by theory, it is believed that a nuclear localization sequence is not necessary for Cpf1 CRISPR-Cas complex activity in eukaryotes, but that including such sequences enhances activity of the system, especially as to targeting nucleic acid molecules in the nucleus.

[0478] In some embodiments, the Cpf1 enzyme is Cpf1 of a bacterial species selected from the group consisting of Francisella tularensis 1, Francisella tularensis subsp. novicida, Prevotella albensis, Lachnospiraceae bacterium MC2017 1, Butyrivibrio proteoclasticus, Peregrinibacteria bacterium GW2011_GWA2_33_10, Parcubacteria bacterium GW2011_GWC2_44_17, Smithella sp. SCADC, Acidaminococcus sp. BV3L6, Lachnospiraceae bacterium MA2020, Candidatus Methanoplasma termitum, Eubacterium eligens, Moraxella bovoculi 237, Leptospira inadai, Lachnospiraceae bacterium ND2006, Porphyromonas crevioricanis 3, Prevotella disiens, and Porphyromonas macacae, and may include mutated CPf1 derived from these organisms. The enzyme may be a Cpf1 homolog or ortholog. In some embodiments, the Cpf1 is codon-optimized for expression in a eukaryotic cell. In some embodiments, the Cpf1 directs cleavage of one or two strands at the location of the target sequence. In a preferred embodiment, the strand break is a staggered cut with a 5′ overhang. In some embodiments, the first regulatory element is a polymerase III promoter. In some embodiments, the second regulatory element is a polymerase II promoter. In some embodiments, the direct repeat has a minimum length of 16 nts and a single stem loop. In further embodiments the direct repeat has a length longer than 16 nts, preferably more than 17 nts, and has more than one stem loop or optimized secondary structures.

[0479] In one aspect, the invention provides a eukaryotic host cell comprising (a) a first regulatory element operably linked to a direct repeat sequence and one or more insertion sites for inserting one or more guide sequences downstream of the DR sequence, wherein when expressed, the guide sequence directs sequence-specific binding of a Cpf1 CRISPR-Cas complex to a target sequence in a eukaryotic cell, wherein the Cpf1 CRISPR-Cas complex comprises Cpf1 complexed with (1) the guide sequence that is hybridized to the target sequence, and (2) the DR sequence; and/or (b) a second regulatory element operably linked to an enzyme-coding sequence encoding said Cpf1 enzyme comprising a nuclear localization sequence. In some embodiments, the host cell comprises components (a) and (b); this includes the present split Cpf1. In some embodiments, component (a), component (b), or components (a) and (b) are stably integrated into a genome of the host eukaryotic cell. In some embodiments, component (a) further comprises two or more guide sequences operably linked to the first regulatory element, wherein when expressed, each of the two or more guide sequences direct sequence specific binding of a Cpf1 CRISPR-Cas complex to a different target sequence in a eukaryotic cell. In some embodiments, the CPf1 is codon-optimized for expression in a eukaryotic cell. In some embodiments, the Cpf1 directs cleavage of one or two strands at the location of the target sequence. In a preferred embodiment, the strand break is a staggered cut with a 5′ overhang. In some embodiments, the Cpf1 lacks DNA strand cleavage activity. In some embodiments, the first regulatory element is a polymerase III promoter. In some embodiments, the direct repeat has a minimum length of 16 nts and a single stem loop. In further embodiments the direct repeat has a length longer than 16 nts, preferably more than 17 nts, and has more than one stem loop or optimized secondary structures. In an aspect, the invention provides a non-human eukaryotic organism; preferably a multicellular eukaryotic organism, comprising a eukaryotic host cell according to any of the described embodiments. In other aspects, the invention provides a eukaryotic organism; preferably a multicellular eukaryotic organism, comprising a eukaryotic host cell according to any of the described embodiments. The organism in some embodiments of these aspects may be an animal; for example a mammal. Also, the organism may be an arthropod such as an insect. The organism also may be a plant. Further, the organism may be a fungus.

[0480] In one aspect, the invention provides a kit comprising one or more of the components described herein. In some embodiments, the kit comprises a vector system and instructions for using the kit. In some embodiments, the vector system comprises (a) a first regulatory element operably linked to a direct repeat sequence and one or more insertion sites for inserting one or more guide sequences downstream of the DR sequence, wherein when expressed, the guide sequence directs sequence-specific binding of a Cpf1 CRISPR-Cas complex to a target sequence in a eukaryotic cell, wherein the Cpf1 CRISPR-Cas complex comprises Cpf1 complexed with (1) the guide sequence that is hybridized to the target sequence, and (2) the DR sequence; and/or (b) a second regulatory element operably linked to an enzyme-coding sequence encoding said Cpf1 enzyme comprising a nuclear localization sequence and advantageously this includes the present split Cpf1. In some embodiments, the kit comprises components (a) and (b) located on the same or different vectors of the system. In some embodiments, component (a) further comprises two or more guide sequences operably linked to the first regulatory element, wherein when expressed, each of the two or more guide sequences direct sequence specific binding of a Cpf1 CRISPR-Cas complex to a different target sequence in a eukaryotic cell. In some embodiments, the Cpf1 comprises one or more nuclear localization sequences of sufficient strength to drive accumulation of said Cpf1 in a detectable amount in the nucleus of a eukaryotic cell. In some embodiments, the Cpf1 enzyme is Cpf1 of a bacterial species selected from the group consisting of Francisella tularensis 1, Francisella tularensis subsp. novicida, Prevotella albensis, Lachnospiraceae bacterium MC2017 1, Butyrivibrio proteoclasticus, Peregrinibacteria bacterium GW2011_GWA2_33_10, Parcubacteria bacterium GW2011_GWC2_44_17, Smithella sp. SCADC, Acidaminococcus sp. BV3L6, Lachnospiraceae bacterium MA2020, Candidatus Methanoplasma termitum, Eubacterium eligens, Moraxella bovoculi 237, Leptospira inadai, Lachnospiraceae bacterium ND2006, Porphyromonas crevioricanis 3, Prevotella disiens, and Porphyromonas macacae, and may include mutated CPf1 derived from these organisms. The enzyme may be a Cpf1 homolog or ortholog. In some embodiments, the Cpf1 is codon-optimized for expression in a eukaryotic cell. In some embodiments, the Cpf1 directs cleavage of one or two strands at the location of the target sequence. In a preferred embodiment, the strand break is a staggered cut with a 5′ overhang. In some embodiments, the CRISPR enzyme lacks DNA strand cleavage activity. In some embodiments, the direct repeat has a minimum length of 16 nts and a single stem loop. In further embodiments the direct repeat has a length longer than 16 nts, preferably more than 17 nts, and has more than one stem loop or optimized secondary structures.

[0481] In one aspect, the invention provides a method of modifying a target polynucleotide in a eukaryotic cell. In some embodiments, the method comprises allowing a Cpf1 CRISPR-Cas complex to bind to the target polynucleotide to effect cleavage of said target polynucleotide thereby modifying the target polynucleotide, wherein the Cpf1 CRISPR-Cas complex comprises Cpf1 complexed with a guide sequence hybridized to a target sequence within said target polynucleotide, wherein said guide sequence is linked to a direct repeat sequence. In some embodiments, said cleavage comprises cleaving one or two strands at the location of the target sequence by said Cpf1; this includes the present split Cpf1. In some embodiments, said cleavage results in decreased transcription of a target gene. In some embodiments, the method further comprises repairing said cleaved target polynucleotide by homologous recombination with an exogenous template polynucleotide, wherein said repair results in a mutation comprising an insertion, deletion, or substitution of one or more nucleotides of said target polynucleotide. In some embodiments, said mutation results in one or more amino acid changes in a protein expressed from a gene comprising the target sequence. In some embodiments, the method further comprises delivering one or more vectors to said eukaryotic cell, wherein the one or more vectors drive expression of one or more of: the Cpf1, and the guide sequence linked to the DR sequence. In some embodiments, said vectors are delivered to the eukaryotic cell in a subject. In some embodiments, said modifying takes place in said eukaryotic cell in a cell culture. In some embodiments, the method further comprises isolating said eukaryotic cell from a subject prior to said modifying. In some embodiments, the method further comprises returning said eukaryotic cell and/or cells derived therefrom to said subject.

[0482] In one aspect, the invention provides a method of modifying expression of a polynucleotide in a eukaryotic cell. In some embodiments, the method comprises allowing a Cpf1 CRISPR-Cas complex to bind to the polynucleotide such that said binding results in increased or decreased expression of said polynucleotide; wherein the Cpf1 CRISPR-Cas complex comprises Cpf1 complexed with a guide sequence hybridized to a target sequence within said polynucleotide, wherein said guide sequence is linked to a direct repeat sequence; this includes the present split Cpf1. In some embodiments, the method further comprises delivering one or more vectors to said eukaryotic cells, wherein the one or more vectors drive expression of one or more of: the Cpf1, and the guide sequence linked to the DR sequence.

[0483] In one aspect, the invention provides a method of generating a model eukaryotic cell comprising a mutated disease gene. In some embodiments, a disease gene is any gene associated an increase in the risk of having or developing a disease. In some embodiments, the method comprises (a) introducing one or more vectors into a eukaryotic cell, wherein the one or more vectors drive expression of one or more of: Cpf1, and a guide sequence linked to a direct repeat sequence; and (b) allowing a Cpf1 CRISPR-Cas complex to bind to a target polynucleotide to effect cleavage of the target polynucleotide within said disease gene, wherein the Cpf1 CRISPR-Cas complex comprises the Cpf1 complexed with (1) the guide sequence that is hybridized to the target sequence within the target polynucleotide, and (2) the DR sequence, thereby generating a model eukaryotic cell comprising a mutated disease gene; this includes the present split Cpf1. In some embodiments, said cleavage comprises cleaving one or two strands at the location of the target sequence by said Cpf1. In a preferred embodiment, the strand break is a staggered cut with a 5′ overhang. In some embodiments, said cleavage results in decreased transcription of a target gene. In some embodiments, the method further comprises repairing said cleaved target polynucleotide by homologous recombination with an exogenous template polynucleotide, wherein said repair results in a mutation comprising an insertion, deletion, or substitution of one or more nucleotides of said target polynucleotide. In some embodiments, said mutation results in one or more amino acid changes in a protein expression from a gene comprising the target sequence.

[0484] In one aspect, the invention provides a method for developing a biologically active agent that modulates a cell signaling event associated with a disease gene. In some embodiments, a disease gene is any gene associated an increase in the risk of having or developing a disease. In some embodiments, the method comprises (a) contacting a test compound with a model cell of any one of the described embodiments; and (b) detecting a change in a readout that is indicative of a reduction or an augmentation of a cell signaling event associated with said mutation in said disease gene, thereby developing said biologically active agent that modulates said cell signaling event associated with said disease gene.

[0485] In one aspect, the invention provides a recombinant polynucleotide comprising a guide sequence downstream of a direct repeat sequence, wherein the guide sequence when expressed directs sequence-specific binding of a Cpf1 CRISPR-Cas complex to a corresponding target sequence present in a eukaryotic cell. In some embodiments, the target sequence is a viral sequence present in a eukaryotic cell. In some embodiments, the target sequence is a proto-oncogene or an oncogene.

[0486] In one aspect the invention provides for a method of selecting one or more cell(s) by introducing one or more mutations in a gene in the one or more cell(s), the method comprising: introducing one or more vectors into the cell(s), wherein the one or more vectors drive expression of one or more of: Cpf1, a guide sequence linked to a direct repeat sequence, and an editing template; wherein the editing template comprises the one or more mutations that abolish Cpf1 cleavage; allowing homologous recombination of the editing template with the target polynucleotide in the cell(s) to be selected; allowing a Cpf1 CRISPR-Cas complex to bind to a target polynucleotide to effect cleavage of the target polynucleotide within said gene, wherein the Cpf1 CRISPR-Cas complex comprises the Cpf1 complexed with (1) the guide sequence that is hybridized to the target sequence within the target polynucleotide, and (2) the direct repeat sequence, wherein binding of the Cpf1 CRISPR-Cas complex to the target polynucleotide induces cell death, thereby allowing one or more cell(s) in which one or more mutations have been introduced to be selected; this includes the present split Cpf1. In another preferred embodiment of the invention the cell to be selected may be a eukaryotic cell. Aspects of the invention allow for selection of specific cells without requiring a selection marker or a two-step process that may include a counter-selection system.

[0487] Herein there is the phrase “this includes the present split Cpf1” or similar text; and, this is to indicate that Cpf1 in embodiments herein can be a split Cpf1 as herein discussed.

[0488] In an aspect the invention involves a non-naturally occurring or engineered inducible Cpf1 CRISPR-Cas system, comprising a first Cpf1 fusion construct attached to a first half of an inducible heterodimer and a second Cpf1 fusion construct attached to a second half of the inducible heterodimer, wherein the first CPf1 fusion construct is operably linked to one or more nuclear localization signals, wherein the second CPf1 fusion construct is operably linked to a nuclear export signal, wherein contact with an inducer energy source brings the first and second halves of the inducible heterodimer together, wherein bringing the first and second halves of the inducible heterodimer together allows the first and second Cpf1 fusion constructs to constitute a functional Cpf1 CRISPR-Cas system, wherein the Cpf1 CRISPR-Cas system comprises a guide RNA (gRNA) comprising a guide sequence capable of hybridizing to a target sequence in a genomic locus of interest in a cell, and wherein the functional Cpf1 CRISPR-Cas system edits the genomic locus to alter gene expression. In an embodiment of the invention the first half of the inducible heterodimer is FKBP12 and the second half of the inducible heterodimer is FRB. In another embodiment of the invention the inducer energy source is rapamycin.

[0489] An inducer energy source may be considered to be simply an inducer or a dimerizing agent. The term ‘inducer energy source’ is used herein throughout for consistency. The inducer energy source (or inducer) acts to reconstitute the Cpf1. In some embodiments, the inducer energy source brings the two parts of the Cpf1 together through the action of the two halves of the inducible dimer. The two halves of the inducible dimer therefore are brought tougher in the presence of the inducer energy source. The two halves of the dimer will not form into the dimer (dimerize) without the inducer energy source.

[0490] Thus, the two halves of the inducible dimer cooperate with the inducer energy source to dimerize the dimer. This in turn reconstitutes the Cpf1 by bringing the first and second parts of the Cpf1 together.

[0491] The CRISPR enzyme fusion constructs each comprise one part of the split Cpf1. These are fused, preferably via a linker such as a GlySer linker described herein, to one of the two halves of the dimer. The two halves of the dimer may be substantially the same two monomers that together that form the homodimer, or they may be different monomers that together form the heterodimer. As such, the two monomers can be thought of as one half of the full dimer.

[0492] The Cpf1 is split in the sense that the two parts of the Cpf1 enzyme substantially comprise a functioning Cpf1. That Cpf1 may function as a genome editing enzyme (when forming a complex with the target DNA and the guide), such as a nickase or a nuclease (cleaving both strands of the DNA), or it may be a dead-Cpf1 which is essentially a DNA-binding protein with very little or no catalytic activity, due to typically mutation(s) in its catalytic domains.

[0493] The two parts of the split Cpf1 can be thought of as the N′ terminal part and the C′ terminal part of the split Cpf1. The fusion is typically at the split point of the Cpf1. In other words, the C′ terminal of the N′ terminal part of the split Cpf1 is fused to one of the dimer halves, whilst the N′ terminal of the C′ terminal part is fused to the other dimer half.

[0494] The Cpf1 does not have to be split in the sense that the break is newly created. The split point is typically designed in silico and cloned into the constructs. Together, the two parts of the split Cpf1, the N′ terminal and C′ terminal parts, form a full Cpf1, comprising preferably at least 70% or more of the wildtype amino acids (or nucleotides encoding them), preferably at least 80% or more, preferably at least 90% or more, preferably at least 95% or more, and most preferably at least 99% or more of the wildtype amino acids (or nucleotides encoding them). Some trimming may be possible, and mutants are envisaged. Non-functional domains may be removed entirely. What is important is that the two parts may be brought together and that the desired Cpf1 function is restored or reconstituted.

[0495] The dimer may be a homodimer or a heterodimer.

[0496] One or more, preferably two, NLSs may be used in operable linkage to the first Cpf1 construct. One or more, preferably two, NESs may be used in operable linkage to the first Cpf1 construct. The NLSs and/or the NESs preferably flank the split Cpf1-dimer (i.e., half dimer) fusion, i.e., one NLS may be positioned at the N′ terminal of the first Cpf1 construct and one NLS may be at the C′ terminal of the first Cpf1 construct. Similarly, one NES may be positioned at the N′ terminal of the second Cpf1 construct and one NES may be at the C′ terminal of the second Cpf1 construct. Where reference is made to N′ or C′ terminals, it will be appreciated that these correspond to 5′ ad 3′ ends in the corresponding nucleotide sequence.

[0497] A preferred arrangement is that the first Cpf1 construct is arranged 5′-NLS-(N′ terminal Cpf1 part)-linker-(first half of the dimer)-NLS-3′. A preferred arrangement is that the second Cpf1 construct is arranged 5′-NES-(second half of the dimer)-linker-(C′ terminal Cpf1 part)-NES-3′. A suitable promoter is preferably upstream of each of these constructs. The two constructs may be delivered separately or together.

[0498] In some embodiments, one or all of the NES(s) in operable linkage to the second CPf1 construct may be swapped out for an NLS. However, this may be typically not preferred and, in other embodiments, the localization signal in operable linkage to the second Cpf1 construct is one or more NES(s).

[0499] It will also be appreciated that the NES may be operably linked to the N′ terminal fragment of the split Cpf1 and that the NLS may be operably linked to the C′ terminal fragment of the split Cpf1. However, the arrangement where the NLS is operably linked to the N′ terminal fragment of the split Cpf1 and that the NES is operably linked to the C′ terminal fragment of the split Cpf1 may be preferred.

[0500] The NES functions to localize the second Cpf1 fusion construct outside of the nucleus, at least until the inducer energy source is provided (e.g., at least until an energy source is provided to the inducer to perform its function). The presence of the inducer stimulates dimerization of the two Cpf1 fusions within the cytoplasm and makes it thermodynamically worthwhile for the dimerized, first and second, Cpf1 fusions to localize to the nucleus. Without being bound by theory, Applicants believe that the NES sequesters the second Cpf1 fusion to the cytoplasm (i.e., outside of the nucleus). The NLS on the first Cpf1 fusion localizes it to the nucleus. In both cases, Applicants use the NES or NLS to shift an equilibrium (the equilibrium of nuclear transport) to a desired direction. The dimerization typically occurs outside of the nucleus (a very small fraction might happen in the nucleus) and the NLSs on the dimerized complex shift the equilibrium of nuclear transport to nuclear localization, so the dimerized and hence reconstituted Cpf1 enters the nucleus.

[0501] Beneficially, Applicants are able to reconstitute function in the split Cpf1. Transient transfection is used to prove the concept and dimerization occurs in the background in the presence of the inducer energy source. No activity is seen with separate fragments of the Cpf1. Stable expression through lentiviral delivery is then used to develop this and show that a split Cpf1 approach can be used.

[0502] This present split Cpf1 approach is beneficial as it allows the Cpf1 activity to be inducible, thus allowing for temporal control. Furthermore, different localization sequences may be used (i.e., the NES and NLS as preferred) to reduce background activity from auto-assembled complexes. Tissue specific promoters, for example one for each of the first and second Cpf1 fusion constructs, may also be used for tissue-specific targeting, thus providing spatial control. Two different tissue specific promoters may be used to exert a finer degree of control if required. The same approach may be used in respect of stage-specific promoters or there may a mixture of stage and tissue specific promoters, where one of the first and second Cpf1 fusion constructs is under the control of (i.e. operably linked to or comprises) a tissue-specific promoter, whilst the other of the first and second Cpf1 fusion constructs is under the control of (i.e. operably linked to or comprises) a stage-specific promoter.

[0503] The inducible Cpf1 CRISPR-Cas system comprises one or more nuclear localization sequences (NLSs), as described herein, for example as operably linked to the first Cpf1 fusion construct. These nuclear localization sequences are ideally of sufficient strength to drive accumulation of said first Cpf1 fusion construct in a detectable amount in the nucleus of a eukaryotic cell. Without wishing to be bound by theory, it is believed that a nuclear localization sequence is not necessary for Cpf1 CRISPR-Cas complex activity in eukaryotes, but that including such sequences enhances activity of the system, especially as to targeting nucleic acid molecules in the nucleus, and assists with the operation of the present 2-part system.

[0504] Equally, the second Cpf1 fusion construct is operably linked to a nuclear export sequence (NES). Indeed, it may be linked to one or more nuclear export sequences. In other words, the number of export sequences used with the second Cpf1 fusion construct is preferably 1 or 2 or 3. Typically 2 is preferred, but 1 is enough and so is preferred in some embodiments. Suitable examples of NLS and NES are known in the art. For example, a preferred nuclear export signal (NES) is human protein tyrosin kinase 2. Preferred signals will be species specific.

[0505] Where the FRB and FKBP system are used, the FKBP is preferably flanked by nuclear localization sequences (NLSs). Where the FRB and FKBP system are used, the preferred arrangement is N′ terminal Cpf1-FRB-NES:C′ terminal Cpf1-FKBP-NLS. Thus, the first Cpf1 fusion construct would comprise the C′ terminal Cpf1 part and the second Cpf1 fusion construct would comprise the N′ terminal Cpf1 part.

[0506] Another beneficial aspect to the present invention is that it may be turned on quickly, i.e. that is has a rapid response. It is believed, without being bound by theory, that Cpf1 activity can be induced through dimerization of existing (already present) fusion constructs (through contact with the inducer energy source) more rapidly than through the expression (especially translation) of new fusion constructs. As such, the first and second Cpf1 fusion constructs may be expressed in the target cell ahead of time, i.e. before Cpf1 activity is required. Cpf1 activity can then be temporally controlled and then quickly constituted through addition of the inducer energy source, which ideally acts more quickly (to dimerize the heterodimer and thereby provide Cpf1 activity) than through expression (including induction of transcription) of Cpf1 delivered by a vector, for example.

[0507] The terms Cpf1 or Cpf1 enzyme and CRISPR enzyme are used interchangeably herein unless otherwise apparent.

[0508] Applicants demonstrate that CPf1 can be split into two components, which reconstitute a functional nuclease when brought back together. Employing rapamycin sensitive dimerization domains, Applicants generate a chemically inducible Cpf1 for temporal control of Cpf1-mediated genome editing and transcription modulation. Put another way, Applicants demonstrate that Cpf1 can be rendered chemically inducible by being split into two fragments and that rapamycin-sensitive dimerization domains may be used for controlled reassembly of the Cpf1. Applicants show that the re-assembled Cpf1 may be used to mediate genome editing (through nuclease/nickase activity) as well as transcription modulation (as a DNA-binding domain, the so-called “dead Cpf1”).

[0509] As such, the use of rapamycin-sensitive dimerization domains is preferred. Reassembly of the Cpf1 is preferred. Reassembly can be determined by restoration of binding activity. Where the Cpf1 is a nickase or induces a double-strand break, suitable comparison percentages compared to a wildtype are described herein.

[0510] Rapamycin treatments can last 12 days. The dose can be 200 nM. This temporal and/or molar dosage is an example of an appropriate dose for Human embryonic kidney 293FT (HEK293FT) cell lines and this may also be used in other cell lines. This figure can be extrapolated out for therapeutic use in vivo into, for example, mg/kg. However, it is also envisaged that the standard dosage for administering rapamycin to a subject is used here as well. By the “standard dosage”, it is meant the dosage under rapamycin's normal therapeutic use or primary indication (i.e. the dose used when rapamycin is administered for use to prevent organ rejection).

[0511] It is noteworthy that the preferred arrangement of Cpf1-FRB/FKBP pieces are separate and inactive until rapamycin-induced dimerization of FRB and FKBP results in reassembly of a functional full-length Cpf1 nuclease. Thus, it is preferred that first Cpf1 fusion construct attached to a first half of an inducible heterodimer is delivered separately and/or is localized separately from the second Cpf1 fusion construct attached to a first half of an inducible heterodimer.

[0512] To sequester the Cpf1(N)-FRB fragment in the cytoplasm, where it is less likely to dimerize with the nuclear-localized Cpf1(C)-FKBP fragment, it is preferable to use on Cpf1(N)-FRB a single nuclear export sequence (NES) from the human protein tyrosin kinase 2 (Cpf1(N)-FRB-NES). In the presence of rapamycin, Cpf1 (N)-FRB-NES dimerizes with Cpf1(C)-FKBP-2×NLS to reconstitute a complete Cpf1 protein, which shifts the balance of nuclear trafficking toward nuclear import and allows DNA targeting.

[0513] High dosage of Cpf1 can exacerbate indel frequencies at off-target (OT) sequences which exhibit few mismatches to the guide strand. Such sequences are especially susceptible, if mismatches are non-consecutive and/or outside of the seed region of the guide. Accordingly, temporal control of Cpf1 activity could be used to reduce dosage in long-term expression experiments and therefore result in reduced off-target indels compared to constitutively active Cpf1.

[0514] Viral delivery is preferred. In particular, a lentiviral or AAV delivery vector is envisaged. Applicants generate a split-Cpf1 lentivirus construct, similar to the lentiCRISPR plasmid. The split pieces should be small enough to fit the ˜4.7 kb size limitation of AAV.

[0515] Applicants demonstrate that stable, low copy expression of split Cpf1 can be used to induce substantial indels at a targeted locus without significant mutation at off-target sites. Applicants clone Cpf1 fragments (2 parts based on split 5, described herein).

[0516] A dead Cpf1 may also be used, comprising a VP64 transactivation domain, for example added to Cpf1(C)-FKBP-2×NLS (dead-Cpf1(C)-FKBP-2×NLS-VP64). These fragments reconstitute a catalytically inactive Cpf1-VP64 fusion (dead-Cpf1-VP64). Transcriptional activation is induced by VP64 in the presence of rapamycin to induce the dimerization of the Cpf1(C)-FKBP fusion and the Cpf1(N)-FRB fusion. In other words, Applicants test the inducibility of split dead-Cpf1-VP64 and show that transcriptional activation is induced by split dead-Cpf1-VP64 in the presence of rapamycin. As such, the present inducible Cpf1 may be associated with one or more functional domain, such as a transcriptional activator or repressor or a nuclease (such as Fok1). A functional domain may be bound to or fused with one part of the split Cpf1.

[0517] A preferred arrangement is that the first Cpf1 construct is arranged 5′-First Localization Signal-(N′ terminal CPf1 part)-linker-(first half of the dimer)-First Localization Signal-3′ and the second Cpf1 construct is arranged 5′-Second Localization Signal-(second half of the dimer)-linker-(C′ terminal Cpf1 part)-Second Localization Signal-Functional Domain-3′. Here, a functional domain is placed at the 3′ end of the second Cpf1 construct. Alternatively, a functional domain may be placed at the 5′ end of the first Cpf1 construct. One or more functional domains may be used at the 3′ end or the 5′ end or at both ends. A suitable promoter is preferably upstream of each of these constructs. The two constructs may be delivered separately or together. The Localization Signals may be an NLS or an NES, so long as they are not inter-mixed on each construct.

[0518] In an aspect the invention provides an inducible Cpf1 CRISPR-Cas system wherein the Cpf1 has a diminished nuclease activity of at least 97%, or 100% as compared with the Cpf1 enzyme not having the at least one mutation.

[0519] Accordingly, it is also preferred that the Cpf1 is a dead-Cpf1. Ideally, the split should always be so that the catalytic domain(s) are unaffected. For the dead-Cpf1 the intention is that DNA binding occurs, but not cleavage or nickase activity is shown.

[0520] In an aspect the invention provides an inducible Cpf1 CRISPR-Cas system as herein discussed wherein one or more functional domains is associated with the Cpf1. This functional domain may be associated with (i.e. bound to or fused with) one part of the split Cpf1 or both. There may be one associated with each of the two parts of the split Cpf1. These may therefore be typically provided as part of the first and/or second Cpf1 fusion constructs, as fusions within that construct. The functional domains are typically fused via a linker, such as GlySer linker, as discussed herein. The one or more functional domains may be transcriptional activation domain or a repressor domain. Although they may be different domains it is preferred that all the functional domains are either activator or repressor and that a mixture of the two is not used.

[0521] The transcriptional activation domain may comprise VP64, p65, MyoD1, HSF1, RTA or SET7/9.

[0522] In an aspect, the invention provides an inducible Cpf1 CRISPR-Cas system as herein discussed wherein the one or more functional domains associated with the Cpf1 is a transcriptional repressor domain.

[0523] In an aspect, the invention provides an inducible Cpf1 CRISPR-Cas system as herein discussed wherein the transcriptional repressor domain is a KRAB domain.

[0524] In an aspect, the invention provides an inducible Cpf1 CRISPR-Cas system as herein discussed wherein the transcriptional repressor domain is a NuE domain, NcoR domain, SID domain or a SID4X domain.

[0525] In an aspect the invention provides an inducible Cpf1 CRISPR-Cas system as herein discussed wherein the one or more functional domains associated with the adaptor protein have one or more activities comprising methylase activity, demethylase activity, transcription activation activity, transcription repression activity, transcription release factor activity, histone modification activity, RNA cleavage activity, DNA cleavage activity, DNA integration activity or nucleic acid binding activity.

[0526] Histone modifying domains are also preferred in some embodiments. Exemplary histone modifying domains are discussed below. Transposase domains, HR (Homologous Recombination) machinery domains, recombinase domains, and/or integrase domains are also preferred as the present functional domains. In some embodiments, DNA integration activity includes HR machinery domains, integrase domains, recombinase domains and/or transposase domains.

[0527] In an aspect the invention provides an inducible Cpf1 CRISPR-Cas system as herein discussed wherein the DNA cleavage activity is due to a nuclease.

[0528] In an aspect the invention provides an inducible Cpf1 CRISPR-Cas system as herein discussed wherein the nuclease comprises a Fok1 nuclease.

[0529] The use of such functional domains, which are preferred with the present split Cpf1 system, is also discussed in detail in Konermann et al. (“Genome-scale transcriptional activation with an engineered CRISPR-Cas9 complex” Nature published 11 Dec. 2014).

[0530] The present system may be used with any guide.

[0531] Modified guides may be used in certain embodiments. Particularly preferred are guides embodying the teachings of Konermann Nature 11 Dec. 2014 paper mentioned above. These guides are modified so that protein-binding RNA portions (such as aptamers) are added. Such portion(s) may replace a portion of the guide. Corresponding RNA-binding protein domains can be used to then recognise the RNA and recruit functional domains, such as those described herein, to the guide. This is primarily for use with dead-Cpf1 leading to transcriptional activation or repression or DNA cleavage through nucleases such as Fok1. The use of such guides in combination with dead-Cpf1 is powerful, and it is especially powerful if the Cpf1 itself is also associated with its own functional domain, as discussed herein. When a dead-Cpf1 (with or without its own associated functional domain) is induced to reconstitute in accordance with the present invention, i.e. is a split Cpf1, then the tool is especially useful.

[0532] A guide RNA (gRNA), also preferred for use in the present invention, can comprise a guide sequence capable of hybridizing to a target sequence in a genomic locus of interest in a cell, wherein the gRNA is modified by the insertion of distinct RNA sequence(s) that bind to one or more adaptor proteins, and wherein the adaptor protein is associated with one or more functional domains. The Cpf1 may comprise at least one mutation, such that the Cpf1 enzyme has no more than 5% of the nuclease activity of the Cpf1 enzyme not having the at least one mutation; and/or at least one or more nuclear localization sequences. Also provided is a non-naturally occurring or engineered composition comprising: one or more guide RNA (gRNA) comprising a guide sequence capable of hybridizing to a target sequence in a genomic locus of interest in a cell, a Cpf1 enzyme comprising at least one or more nuclear localization sequences, wherein the CPf1 enzyme comprises at least one mutation, such that the Cpf1 enzyme has no more than 5% of the nuclease activity of the Cpf1 enzyme not having the at least one mutation, wherein the at least one gRNA is modified by the insertion of distinct RNA sequence(s) that bind to one or more adaptor proteins, and wherein the adaptor protein is associated with one or more functional domains.

[0533] The gRNA that is preferably modified by the insertion of distinct RNA sequence(s) that bind to one or more adaptor proteins. The insertion of distinct RNA sequence(s) that bind to one or more adaptor proteins is preferably an aptamer sequence or two or more aptamer sequences specific to the same or different adaptor protein(s). The adaptor protein preferably comprises MS2, PP7, Qβ, F2, GA, fr, JP501, M12, R17, BZ13, JP34, JP500, KU1, M11, MX1, TW18, VK, SP, FI, ID2, NL95, TW19, AP205, φCb5, φCb8r, φCb12r, φCb23r, 7s, PRR1. Cell lines stably expressing inter alia split dead-Cpf1 can be useful.

[0534] Applicants demonstrate that Cpf1 can be split into two distinct fragments, which reconstitute a functional full-length Cpf1 nuclease when brought back together using chemical induction. The split Cpf1 architecture will be useful for a variety of applications. For example, split CPf1 may enable genetic strategies for restricting Cpf1 activity to intersectional cell populations by putting each fragment under a different tissue specific promoter. Additionally, different chemically inducible dimerization domains such as APA and gibberellin may also be employed.

[0535] The inducer energy source is preferably chemical induction.

[0536] The split position or location is the point at which the first part of the Cpf1 enzyme is separated from the second part. In some embodiments, the first part will comprise or encode amino acids 1 to X, whilst the second part will comprise or encode amino acids X+1 to the end. In this example, the numbering is contiguous, but this may not always be necessary as amino acids (or the nucleotides encoding them) could be trimmed from the end of either of the split ends, provided that sufficient DNA binding activity and, if required, DNA nickase or cleavage activity is retained, for example at least 40%, 50%, 60%, 70%, 80%, 90% or 95% activity compared to wildtype Cpf1.

[0537] The exemplary numbering provided herein may be in reference to the wildtype protein, preferably the wildtype FnCpf1. However, it is envisaged that mutants of the wildtype Cpf1 such as of FnCpf1 protein can be used. The numbering may also not follow exactly the FnCpf1 numbering as, for instance, some N′ or C′ terminal truncations or deletions may be used, but this can be addressed using standard sequence alignment tools. Orthologs are also preferred as a sequence alignment tool.

[0538] Thus, the split position may be selected using ordinary skill in the art, for instance based on crystal data and/or computational structure predictions.

[0539] For example, computational analysis of the primary structure of Cpf1 nucleases reveals three distinct regions (FIG. 1). First a C-terminal RuvC like domain, which is the only functional characterized domain. Second a N-terminal alpha-helical region and thirst a mixed alpha and beta region, located between the RuvC like domain and the alpha-helical region. Several small stretches of unstructured regions are predicted within the Cpf1 primary structure. Unstructured regions, which are exposed to the solvent and not conserved within different Cpf1 orthologs, may represent preferred sides for splits (FIG. 2 and FIG. 3).

[0540] The following table presents non-limiting potential split regions within As and LbCpf1. A split site within such a region may be opportune.

| Split region | AsCpf1 | LbCpf1 |
|---|---|---|
| 1 | 575-588 | 566-571 |
| 2 | 631-645 | 754-757 |
| 3 | 653-664 | — |
| 4 | 818-844 | — |

[0541] For Fn, As and Lb Cpf1 mutants, it should be readily apparent what the corresponding position for a potential split site is, for example, based on a sequence alignment. For non-Fn, As and Lb enzymes one can use the crystal structure of an ortholog if a relatively high degree of homology exists between the ortholog and the intended Cpf1, or one can use computational prediction.

[0542] Ideally, the split position should be located within a region or loop. Preferably, the split position occurs where an interruption of the amino acid sequence does not result in the partial or full destruction of a structural feature (e.g. alpha-helixes or beta-sheets). Unstructured regions (regions that do not show up in the crystal structure because these regions are not structured enough to be “frozen” in a crystal) are often preferred options. Applicants can for example make splits in unstructured regions that are exposed on the surface of Cpf1.

[0543] Applicants can follow the following procedure which is provided as a preferred example and as guidance. Since unstructured regions don't show up in the crystal structure, Applicants cross-reference the surrounding amino acid sequence of the crystal with the primary amino acid sequence of the Cpf1. Each unstructured region can be made of for example about 3 to 10 amino acids, which does not show up in the crystal. Applicants therefore make the split in between these amino acids. To include more potential split sides Applicants include splits located in loops at the outside of Cpf1 using the same criteria as with unstructured regions.

[0544] In some embodiments, the split position is in an outside loop of the Cpf1. In other preferred embodiments, the split position is in an unstructured region of the Cpf1. An unstructured region is typically a highly flexible outside loop whose structure cannot be readily determined from a crystal pattern.

[0545] Once the split position has been identified, suitable constructs can be designed.

[0546] Typically, an NES is positioned at the N′ terminal end of the first part of the split amino acid (or the 5′ end of nucleotide encoding it). In that case, an NLS is positioned at the C′ terminal end of the second part of the split amino acid (or the 3′ end of the nucleotide encoding it). In this way, the first Cpf1 fusion construct may be operably linked to one or more nuclear export signals and the second Cpf1 fusion construct may be operably linked to a nuclear localization signal.

[0547] Of course, the reverse arrangement may be provided, where an NLS is positioned at the N′ terminal end of the first part of the split amino acid (or the 5′ end of nucleotide encoding it). In that case, an NES is positioned at the C′ terminal end of the second part of the split amino acid (or the 3′ end of the nucleotide encoding it). Thus, the first Cpf1 fusion construct may be operably linked to one or more nuclear localization signals and the second Cpf1 fusion construct may be operably linked to a nuclear export signal.

[0548] Splits which keep the two parts (either side of the split) roughly the same length may be advantageous for packing purposes. For example, it is thought to be easier to maintain stoichiometry between both pieces when the transcripts are about the same size.

[0549] In certain examples, the N- and C-term pieces of human codon-optimized Cpf1 such as FnCpf1 are fused to FRB and FKBP dimerization domains, respectively. This arrangement may be preferred. They may be switched over (i.e. N′ term to FKBP and C′ term to FRB).

[0550] Linkers such as (GGGGS)₃ are preferably used herein to separate the Cpf1 fragment from the dimerization domain. (GGGGS)₃ is preferable because it is a relatively long linker (15 amino acids). The glycine residues are the most flexible and the serine residues enhance the chance that the linker is on the outside of the protein. (GGGGS)₆ (GGGGS)₉ or (GGGGS)₁₂ may preferably be used as alternatives. Other preferred alternatives are (GGGGS)₁, (GGGGS)₂, (GGGGS)₄, (GGGGS)₅, (GGGGS)₇, (GGGGS)₈, (GGGGS)₁₀, or (GGGGS)₁₁.

[0551] For example, (GGGGS)₃ may be included between the N′ term Cpf1 fragment and FRB. For example, (GGGGS)₃ may be included between FKB and the C′ term Cpf1 fragment.

[0552] Alternative linkers are available, but highly flexible linkers are thought to work best to allow for maximum opportunity for the 2 parts of the Cpf1 to come together and thus reconstitute Cpf1 activity. One alternative is that the NLS of nucleoplasmin can be used as a linker.

[0553] A linker can also be used between the Cpf1 and any functional domain. Again, a (GGGGS)₃ linker may be used here (or the 6, 9, or 12 repeat versions therefore) or the NLS of nucleoplasmin can be used as a linker between CPf1 and the functional domain.

[0554] Alternatives to the FRB/FKBP system are envisaged. For example the ABA and gibberellin system.

[0555] Accordingly, preferred examples of the FKBP family are any one of the following inducible systems. FKBP which dimerizes with CalcineurinA (CNA), in the presence of FK506; FKBP which dimerizes with CyP-Fas, in the presence of FKCsA; FKBP which dimerizes with FRB, in the presence of Rapamycin; GyrB which dimerizes with GryB, in the presence of Coumermycin; GAI which dimerizes with GID1, in the presence of Gibberellin; or Snap-tag which dimerizes with HaloTag, in the presence of HaXS.

[0556] Alternatives within the FKBP family itself are also preferred. For example, FKBP, which homo-dimerizes (i.e. one FKBP dimerizes with another FKBP) in the presence of FK1012. Thus, also provided is a non-naturally occurring or engineered inducible Cpf1 CRISPR-Cas system, comprising:

[0557] a first Cpf1 fusion construct attached to a first half of an inducible homodimer and

[0558] a second Cpf1 fusion construct attached to a second half of the inducible homodimer,

[0559] wherein the first Cpf1 fusion construct is operably linked to one or more nuclear localization signals,

[0560] wherein the second Cpf1 fusion construct is operably linked to a (optionally one or more) nuclear export signal(s),

[0561] wherein contact with an inducer energy source brings the first and second halves of the inducible homodimer together,

[0562] wherein bringing the first and second halves of the inducible homodimer together allows the first and second CPf1 fusion constructs to constitute a functional Cpf1 CRISPR-Cas system,

[0563] wherein the Cpf1 CRISPR-Cas system comprises a guide RNA (gRNA) comprising a guide sequence capable of hybridizing to a target sequence in a genomic locus of interest in a cell, and

[0564] wherein the functional Cpf1 CRISPR-Cas system binds to the target sequence and, optionally, edits the genomic locus to alter gene expression.

[0565] In one embodiment, the homodimer is preferably FKBP and the inducer energy source is preferably FK1012. In another embodiment, the homodimer is preferably GryB and the inducer energy source is preferably Coumermycin. In another embodiment, the homodimer is preferably ABA and the inducer energy source is preferably Gibberellin.

[0566] In other embodiments, the dimer is a heterodimer. Preferred examples of heterodimers are any one of the following inducible systems: FKBP which dimerizes with CalcineurinA (CNA), in the presence of FK506; FKBP which dimerizes with CyP-Fas, in the presence of FKCsA; FKBP which dimerizes with FRB, in the presence of Rapamycin, in the presence of Coumermycin; GAI which dimerizes with GID1, in the presence of Gibberellin; or Snap-tag which dimerizes with HaloTag, in the presence of HaXS.

[0567] Applicants used FKBP/FRB because it is well characterized and both domains are sufficiently small (<100 amino acids) to assist with packaging. Furthermore, rapamycin has been used for a long time and side effects are well understood. Large dimerization domains (>300 aa) should work too but may require longer linkers to make enable Cpf1 reconstitution.

[0568] Paulmurugan and Gambhir (Cancer Res, Aug. 15, 2005 65; 7413) discusses the background to the FRB/FKBP/Rapamycin system. Another useful paper is the article by Crabtree et al. (Chemistry & Biology 13, 99-107, January 2006).

[0569] In an example, a single vector, an expression cassette (plasmid) is constructed. gRNA is under the control of a U6 promoter. Two different Cpf1 splits are used. The split Cpf1 construct is based on a first Cpf1 fusion construct, flanked by NLSs, with FKBP fused to C terminal part of the split CPf1 via a GlySer linker; and a second CPf1 fusion construct, flanked by NESs, with FRB fused with the N terminal part of the split CPf1 via a GlySer linker. To separate the first and second Cpf1 fusion constructs, P2A is used splitting on transcription. The Split Cpf1 shows indel formation similar to wildtype in the presence of rapamycin, but markedly lower indel formation than the wildtype in the absence of rapamycin.

[0570] Accordingly, a single vector is provided. The vector comprises:

[0571] a first Cpf1 fusion construct attached to a first half of an inducible dimer and

[0572] a second Cpf1 fusion construct attached to a second half of the inducible dimer,

[0573] wherein the first Cpf1 fusion construct is operably linked to one or more nuclear localization signals,

[0574] wherein the second CPf1 fusion construct is operably linked to one or more nuclear export signals,

[0575] wherein contact with an inducer energy source brings the first and second halves of the inducible heterodimer together,

[0576] wherein bringing the first and second halves of the inducible heterodimer together allows the first and second CPf1 fusion constructs to constitute a functional Cpf1 CRISPR-Cas system,

[0577] wherein the Cpf1 CRISPR-Cas system comprises a guide RNA (gRNA) comprising a guide sequence capable of hybridizing to a target sequence in a genomic locus of interest in a cell, and

[0578] wherein the functional Cpf1 CRISPR-Cas system binds to the target sequence and, optionally, edits the genomic locus to alter gene expression. These elements are preferably provided on a single construct, for example an expression cassette.

[0579] The first Cpf1 fusion construct is preferably flanked by at least one nuclear localization signal at each end. The second CPf1 fusion construct is preferably flanked by at least one nuclear export signal at each end.

[0580] Also provided is a method of treating a subject in need thereof, comprising inducing gene editing by transforming the subject with the polynucleotide encoding the system or any of the present vectors and administering an inducer energy source to the subject. A suitable repair template may also be provided, for example delivered by a vector comprising said repair template.

[0581] Also provided is a method of treating a subject in need thereof, comprising inducing transcriptional activation or repression by transforming the subject with the polynucleotide encoding the present system or any of the present vectors, wherein said polynucleotide or vector encodes or comprises the catalytically inactive Cpf1 and one or more associated functional domains; the method further comprising administering an inducer energy source to the subject.

[0582] Compositions comprising the present system for use in said method of treatment are also provided. Use of the present system in the manufacture of a medicament for such methods of treatment are also provided.

[0583] Examples of conditions treatable by the present system are described herein or in documents cited herein.

[0584] The single vector can comprise a transcript-splitting agent, for example P2A. P2A splits the transcript in two, to separate the first and second CPf1 fusion constructs. The splitting is due to “ribosomal skipping”. In essence, the ribosome skips an amino acid during translation, which breaks the protein chain and results in two separate polypeptides/proteins. The single vector is also useful for applications where low background activity is not of concern but a high inducible activity is desired.

[0585] One example would be the generation of clonal embryonic stem cell lines. The normal procedure is transient transfection with plasmids encoding wt CPf1 or Cpf1 nickases. These plasmids produce Cpf1 molecules, which stay active for several days and have a higher chance of off target activity. Using the single expression vector for split Cpf1 allows restricting “high” Cpf1 activity to a shorter time window (e.g. one dose of an inducer, such as rapamycin). Without continual (daily) inducer (e.g. rapamycin) treatments the activity of single expression split Cpf1 vectors is low and presents a reduced chance of causing unwanted off target effects.

[0586] A peak of induced Cpf1 activity is beneficial in some embodiments and may most easily be brought about using a single delivery vector, but it is also possible through a dual vector system (each vector delivering one half of the split CPf1). The peak may be high activity and for a short timescale, typically the lifetime of the inducer.

[0587] Accordingly, provided is a method for generation of clonal embryonic stem cell lines, comprising transfecting one or more embryonic stem cells with a polynucleotide encoding the present system or one of the present vectors to express the present split Cpf1 and administering or contacting the one or more stem cells with the present inducer energy source to induce reconstitution of the Cpf1. A repair template may be provided.

[0588] As with all methods described herein, it will be appreciated that suitable gRNA or guides will be required.

[0589] Where functional domains and the like are “associated” with one or other part of the enzyme, these are typically fusions. The term “associated with” is used here in respect of how one molecule ‘associates’ with respect to another, for example between parts of the Cpf1 and a functional domain. In the case of such protein-protein interactions, this association may be viewed in terms of recognition in the way an antibody recognises an epitope. Alternatively, one protein may be associated with another protein via a fusion of the two, for instance one subunit being fused to another subunit. Fusion typically occurs by addition of the amino acid sequence of one to that of the other, for instance via splicing together of the nucleotide sequences that encode each protein or subunit. Alternatively, this may essentially be viewed as binding between two molecules or direct linkage, such as a fusion protein. In any event, the fusion protein may include a linker between the two subunits of interest (i.e. between the enzyme and the functional domain or between the adaptor protein and the functional domain). Thus, in some embodiments, the part of the CPf1 is associated with a functional domain by binding thereto. In other embodiments, the CPf1 is associated with a functional domain because the two are fused together, optionally via an intermediate linker. Examples of linkers include the GlySer linkers discussed herein.

[0590] Other examples of inducers include light and hormones. For light, the inducible dimers may be heterodimers and include first light-inducible half of a dimer and a second (and complimentary) light-inducible half of a dimer. A preferred example of first and second light-inducible dimer halves is the CIB1 and CRY2 system. The CIB1 domain is a heterodimeric binding partner of the light-sensitive Cryptochrome 2 (CRY2).

[0591] In another example, the blue light-responsive Magnet dimerization system (pMag and nMag) may be fused to the two parts of a split Cpf1 protein. In response to light stimulation, pMag and nMag dimerize and Cpf1 reassembles. For example, such system is described in connection with Cas9 in Nihongaki et al. (Nat. Biotechnol. 33, 755-790, 2015).

[0592] The invention comprehends that the inducer energy source may be heat, ultrasound, electromagnetic energy or chemical. In a preferred embodiment of the invention, the inducer energy source may be an antibiotic, a small molecule, a hormone, a hormone derivative, a steroid or a steroid derivative. In a more preferred embodiment, the inducer energy source maybe abscisic acid (ABA), doxycycline (DOX), cumate, rapamycin, 4-hydroxytamoxifen (4OHT), estrogen or ecdysone. The invention provides that the at least one switch may be selected from the group consisting of antibiotic based inducible systems, electromagnetic energy based inducible systems, small molecule based inducible systems, nuclear receptor based inducible systems and hormone based inducible systems. In a more preferred embodiment the at least one switch may be selected from the group consisting of tetracycline (Tet)/DOX inducible systems, light inducible systems, ABA inducible systems, cumate repressor/operator systems, 4OHT/estrogen inducible systems, ecdysone-based inducible systems and FKBP12/FRAP (FKBP12-rapamycin complex) inducible systems. Such inducers are also discussed herein and in PCT/US2013/051418, incorporated herein by reference.

[0593] In general, any use that can be made of a Cpf1, whether wt, nickase or a dead-Cpf1 (with or without associated functional domains) can be pursued using the present split Cpf1 approach. The benefit remains the inducible nature of the Cpf1 activity.

[0594] As a further example, split CPf1 fusions with fluorescent proteins like GFP can be made. This would allow imaging of genomic loci (see “Dynamic Imaging of Genomic Loci in Living Human Cells by an Optimized CRISPR/Cas System” Chen B et al. Cell 2013), but in an inducible manner. As such, in some embodiments, one or more of the Cpf1 parts may be associated (and in particular fused with) a fluorescent protein, for example GFP.

[0595] Further experiments address whether there is a difference in off-target cutting, between wild type (wt) and split Cpf1, when on-target cutting is at the same level. To do this, Applicants use transient transfection of wt and split Cpf1 plasmids and harvest at different time points. Applicants look for off-target activation after finding a set of samples where on-target cutting is within +/−5%. Applicants make cell lines with stable expression of wt or split Cpf1 without guides (using lentivirus). After antibiotic selection, guides are delivered with a separate lentivirus and there is harvest at different time points to measure on-/off-target cutting.

[0596] Applicants introduce a destabilizing sequence (PEST, see “Use of mRNA- and protein-destabilizing elements to develop a highly responsive reporter system” Voon D C et al. Nucleic Acids Research 2005) into the FRB(N)Cpf1-NES fragment to facilitate faster degradation and therefore reduced stability of the split dead-Cpf1-VP64 complex.

[0597] Such destabilizing sequences as described elsewhere in this specification (including PEST) can be advantageous for use with split Cpf1 systems.

[0598] Cell lines stably expressing split dead-Cpf1-VP64 and MS2-p65-HSF1+guide are generated. A PLX resistance screen can demonstrate that a non-reversible, timed transcriptional activation can be useful in drug screens. This approach is may be advantageous when a split dead-Cpf1-VP64 is not reversible.

[0599] In one aspect the invention provides a non-naturally occurring or engineered Cpf1 CRISPR-Cas system which may comprise at least one switch wherein the activity of said Cpf1 CRISPR-Cas system is controlled by contact with at least one inducer energy source as to the switch. In an embodiment of the invention the control as to the at least one switch or the activity of said Cpf1 CRISPR-Cas system may be activated, enhanced, terminated or repressed. The contact with the at least one inducer energy source may result in a first effect and a second effect. The first effect may be one or more of nuclear import, nuclear export, recruitment of a secondary component (such as an effector molecule), conformational change (of protein, DNA or RNA), cleavage, release of cargo (such as a caged molecule or a co-factor), association or dissociation. The second effect may be one or more of activation, enhancement, termination or repression of the control as to the at least one switch or the activity of said Cpf1 CRISPR-Cas system. In one embodiment the first effect and the second effect may occur in a cascade.

[0600] In another aspect of the invention the Cpf1 CRISPR-Cas system may further comprise at least one or more nuclear localization signal (NLS), nuclear export signal (NES), functional domain, flexible linker, mutation, deletion, alteration or truncation. The one or more of the NLS, the NES or the functional domain may be conditionally activated or inactivated. In another embodiment, the mutation may be one or more of a mutation in a transcription factor homology region, a mutation in a DNA binding domain (such as mutating basic residues of a basic helix loop helix), a mutation in an endogenous NLS or a mutation in an endogenous NES. The invention comprehends that the inducer energy source may be heat, ultrasound, electromagnetic energy or chemical. In a preferred embodiment of the invention, the inducer energy source may be an antibiotic, a small molecule, a hormone, a hormone derivative, a steroid or a steroid derivative. In a more preferred embodiment, the inducer energy source maybe abscisic acid (ABA), doxycycline (DOX), cumate, rapamycin, 4-hydroxytamoxifen (4OHT), estrogen or ecdysone. The invention provides that the at least one switch may be selected from the group consisting of antibiotic based inducible systems, electromagnetic energy based inducible systems, small molecule based inducible systems, nuclear receptor based inducible systems and hormone based inducible systems. In a more preferred embodiment the at least one switch may be selected from the group consisting of tetracycline (Tet)/DOX inducible systems, light inducible systems, ABA inducible systems, cumate repressor/operator systems, 4OHT/estrogen inducible systems, ecdysone-based inducible systems and FKBP12/FRAP (FKBP12-rapamycin complex) inducible systems.

[0601] Aspects of control as detailed in this application relate to at least one or more switch(es). The term “switch” as used herein refers to a system or a set of components that act in a coordinated manner to affect a change, encompassing all aspects of biological function such as activation, repression, enhancement or termination of that function. In one aspect the term switch encompasses genetic switches which comprise the basic components of gene regulatory proteins and the specific DNA sequences that these proteins recognize. In one aspect, switches relate to inducible and repressible systems used in gene regulation. In general, an inducible system may be off unless there is the presence of some molecule (called an inducer) that allows for gene expression. The molecule is said to “induce expression”. The manner by which this happens is dependent on the control mechanisms as well as differences in cell type. A repressible system is on except in the presence of some molecule (called a corepressor) that suppresses gene expression. The molecule is said to “repress expression”. The manner by which this happens is dependent on the control mechanisms as well as differences in cell type. The term “inducible” as used herein may encompass all aspects of a switch irrespective of the molecular mechanism involved. Accordingly a switch as comprehended by the invention may include but is not limited to antibiotic based inducible systems, electromagnetic energy based inducible systems, small molecule based inducible systems, nuclear receptor based inducible systems and hormone based inducible systems. In preferred embodiments the switch may be a tetracycline (Tet)/DOX inducible system, a light inducible systems, a Abscisic acid (ABA) inducible system, a cumate repressor/operator system, a 4OHT/estrogen inducible system, an ecdysone-based inducible systems or a FKBP12/FRAP (FKBP12-rapamycin complex) inducible system.

[0602] The present Cpf1 CRISPR-Cas system may be designed to modulate or alter expression of individual endogenous genes in a temporally and spatially precise manner. The Cpf1 CRISPR-Cas system may be designed to bind to the promoter sequence of the gene of interest to change gene expression. The Cpf1 may be spilt into two where one half is fused to one half of the cryptochrome heterodimer (cryptochrome-2 or CIB1), while the remaining cryptochrome partner is fused to the other half of the Cpf1. In some aspects, a transcriptional effector domain may also be included in the Cpf1 CRISPR-Cas system. Effector domains may be either activators, such as VP16, VP64, or p65, or repressors, such as KRAB, EnR, or SID. In unstimulated state, the one half Cpf1-cryptochrome2 protein localizes to the promoter of the gene of interest, but is not bound to the CIB1-effector protein. Upon stimulation with blue spectrum light, cryptochrome-2 becomes activated, undergoes a conformational change, and reveals its binding domain. CIB1, in turn, binds to cryptochrome-2 resulting in localization of the second half of the Cpf1 to the promoter region of the gene of interest and initiating genome editing which may result in gene overexpression or silencing. Aspects of LITEs are further described in Liu, H et al., Science, 2008 and Kennedy M et al., Nature Methods 2010, the contents of which are herein incorporated by reference in their entirety.

[0603] Activator and repressor domains which may further modulate function may be selected on the basis of species, strength, mechanism, duration, size, or any number of other parameters. Preferred effector domains include, but are not limited to, a transposase domain, integrase domain, recombinase domain, resolvase domain, invertase domain, protease domain, DNA methyltransferase domain, DNA demethylase domain, histone acetylase domain, histone deacetylases domain, nuclease domain, repressor domain, activator domain, nuclear-localization signal domains, transcription-protein recruiting domain, cellular uptake activity associated domain, nucleic acid binding domain or antibody presentation domain.

[0604] There are several different ways to generate chemical inducible systems as well: 1. ABI-PYL based system inducible by Abscisic Acid (ABA) (see, e.g., website at stke.sciencemag.org/cgi/content/abstract/sigtrans;4/164/rs2), 2. FKBP-FRB based system inducible by rapamycin (or related chemicals based on rapamycin) (see, e.g., website at nature.com/nmeth/journal/v2/n6/full/nmeth763.html), 3. GID1-GAI based system inducible by Gibberellin (GA) (see, e.g., website at nature.com/nchembio/journal/v8/n5/full/nchembio.922.html).

[0605] Another system contemplated by the present invention is a chemical inducible system based on change in sub-cellular localization. Applicants also comprehend an inducible Cpf1 CRISPR-Cas system engineered to target a genomic locus of interest wherein the Cpf1 enzyme is split into two fusion constructs that are further linked to different parts of a chemical or energy sensitive protein. This chemical or energy sensitive protein will lead to a change in the sub-cellular localization of either half of the CPf1 enzyme (i.e. transportation of either half of the Cpf1 enzyme from cytoplasm into the nucleus of the cells) upon the binding of a chemical or energy transfer to the chemical or energy sensitive protein. This transportation of fusion constructs from one sub-cellular compartments or organelles, in which its activity is sequestered due to lack of substrate for the reconstituted Cpf1 CRISPR-Cas system, into another one in which the substrate is present would allow the components to come together and reconstitute functional activity and to then come in contact with its desired substrate (i.e. genomic DNA in the mammalian nucleus) and result in activation or repression of target gene expression.

[0606] Other inducible systems are contemplated such as, but not limited to, regulation by heavy-metals [Mayo K E et al., Cell 1982, 29:99-108; Searle P F et al., Mol Cell Biol 1985, 5:1480-1489 and Brinster R L et al., Nature (London) 1982, 296:39-42], steroid hormones [Hynes N E et al., Proc Natl Acad Sci USA 1981, 78:2038-2042; Klock G et al., Nature (London) 1987, 329:734-736 and Lee F et al., Nature (London) 1981, 294:228-232.], heat shock [Nouer L: Heat Shock Response. Boca Raton, Fla.: CRC; 1991] and other reagents have been developed [Mullick A, Massie B: Transcription, translation and the control of gene expression. In Encyclopedia of Cell Technology Edited by: Speir R E. Wiley; 2000: 1140-1164 and Fussenegger M, Biotechnol Prog 2001, 17:1-51]. However, there are limitations with these inducible mammalian promoters such as “leakiness” of the “off” state and pleiotropic effects of inducers (heat shock, heavy metals, glucocorticoids etc.). The use of insect hormones (ecdysone) has been proposed in an attempt to reduce the interference with cellular processes in mammalian cells [No D et al., Proc Natl Acad Sci USA 1996, 93:3346-3351]. Another elegant system uses rapamycin as the inducer [Rivera V M et al., Nat Med 1996, 2:1028-1032] but the role of rapamycin as an immunosuppressant was a major limitation to its use in vivo and therefore it was necessary to find a biologically inert compound [Saez E et al., Proc Natl Acad Sci USA 2000, 97:14512-14517] for the control of gene expression.

[0607] In particular embodiments, the gene editing systems described herein are placed under the control of a passcode kill switch, which is a mechanisms which efficiently kills the host cell when the conditions of the cell are altered. This is ensured by introducing hybrid LacI-GalR family transcription factors, which require the presence of IPTG to be switched on (Chan et al. 2015 Nature Nature Chemical Biology doi:10.1038/nchembio.1979 which can be used to drive a gene encoding an enzyme critical for cell-survival. By combining different transcription factors sensitive to different chemicals, a “code” can be generated, This system can be used to spatially and temporally control the extent of CRISPR-induced genetic modifications, which can be of interest in different fields including therapeutic applications and may also be of interest to avoid the “escape” of GMOs from their intended environment.

### Self-Inactivating Systems

[0608] Once all copies of a gene in the genome of a cell have been edited, continued CRISPR/Cpf1 expression in that cell is no longer necessary. Indeed, sustained expression would be undesirable in case of off-target effects at unintended genomic sites, etc. Thus time-limited expression would be useful. Inducible expression offers one approach, but in addition Applicants envisage a Self-Inactivating CRISPR-Cpf1 system that relies on the use of a non-coding guide target sequence within the CRISPR vector itself. Thus, after expression begins, the CRISPR system will lead to its own destruction, but before destruction is complete it will have time to edit the genomic copies of the target gene (which, with a normal point mutation in a diploid cell, requires at most two edits). Simply, the self inactivating CRISPR-Cas system includes additional RNA (i.e., guide RNA) that targets the coding sequence for the CRISPR enzyme itself or that targets one or more non-coding guide target sequences complementary to unique sequences present in one or more of the following:

[0609] (a) within the promoter driving expression of the non-coding RNA elements,

[0610] (b) within the promoter driving expression of the Cpf1 gene,

[0611] (c) within 100 bp of the ATG translational start codon in the Cpf1 coding sequence,

[0612] (d) within the inverted terminal repeat (iTR) of a viral delivery vector, e.g., in the AAV genome.

[0613] Furthermore, that RNA can be delivered via a vector, e.g., a separate vector or the same vector that is encoding the CRISPR complex. When provided by a separate vector, the CRISPR RNA that targets Cpf1 expression can be administered sequentially or simultaneously. When administered sequentially, the CRISPR RNA that targets Cpf1 expression is to be delivered after the CRISPR RNA that is intended for e.g. gene editing or gene engineering. This period may be a period of minutes (e.g. 5 minutes, 10 minutes, 20 minutes, 30 minutes, 45 minutes, 60 minutes). This period may be a period of hours (e.g. 2 hours, 4 hours, 6 hours, 8 hours, 12 hours, 24 hours). This period may be a period of days (e.g. 2 days, 3 days, 4 days, 7 days). This period may be a period of weeks (e.g. 2 weeks, 3 weeks, 4 weeks). This period may be a period of months (e.g. 2 months, 4 months, 8 months, 12 months). This period may be a period of years (2 years, 3 years, 4 years). In this fashion, the Cas enzyme associates with a first gRNA capable of hybridizing to a first target, such as a genomic locus or loci of interest and undertakes the function(s) desired of the CRISPR-Cas system (e.g., gene engineering); and subsequently the Cpf1 enzyme may then associate with the second gRNA capable of hybridizing to the sequence comprising at least part of the Cpf1 or CRISPR cassette. Where the gRNA targets the sequences encoding expression of the Cpf1 protein, the enzyme becomes impeded and the system becomes self inactivating. In the same manner, CRISPR RNA that targets Cpf1 expression applied via, for example liposome, lipofection, nanoparticles, microvesicles as explained herein, may be administered sequentially or simultaneously. Similarly, self-inactivation may be used for inactivation of one or more guide RNA used to target one or more targets.

[0614] In some aspects, a single gRNA is provided that is capable of hybridization to a sequence downstream of a CRISPR enzyme start codon, whereby after a period of time there is a loss of the CRISPR enzyme expression. In some aspects, one or more gRNA(s) are provided that are capable of hybridization to one or more coding or non-coding regions of the polynucleotide encoding the CRISPR-Cas system, whereby after a period of time there is a inactivation of one or more, or in some cases all, of the CRISPR-Cas systems. In some aspects of the system, and not to be limited by theory, the cell may comprise a plurality of CRISPR-Cas complexes, wherein a first subset of CRISPR complexes comprise a first gRNA capable of targeting a genomic locus or loci to be edited, and a second subset of CRISPR complexes comprise at least one second gRNA capable of targeting the polynucleotide encoding the CRISPR-Cas system, wherein the first subset of CRISPR-Cas complexes mediate editing of the targeted genomic locus or loci and the second subset of CRISPR complexes eventually inactivate the CRISPR-Cas system, thereby inactivating further CRISPR-Cas expression in the cell.

[0615] Thus the invention provides a CRISPR-Cas system comprising one or more vectors for delivery to a eukaryotic cell, wherein the vector(s) encode(s): (i) a CRISPR enzyme, more particularly Cpf1; (ii) a first guide RNA capable of hybridizing to a target sequence in the cell; and (iii) a second guide RNA capable of hybridizing to one or more target sequence(s) in the vector which encodes the CRISPR enzyme, When expressed within the cell, the first guide RNA directs sequence-specific binding of a first CRISPR complex to the target sequence in the cell; the second guide RNA directs sequence-specific binding of a second CRISPR complex to the target sequence in the vector which encodes the CRISPR enzyme; the CRISPR complexes comprise a CRISPR enzyme bound to a guide RNA, whereby a guide RNA can hybridize to its target sequence; and the second CRISPR complex inactivates the CRISPR-Cas system to prevent continued expression of the CRISPR enzyme by the cell.

[0616] Further characteristics of the vector(s), the encoded enzyme, the guide sequences, etc. are disclosed elsewhere herein. The system can encode (i) a CRISPR enzyme, more particularly Cpf1; (ii) a first gRNA comprising a sequence capable of hybridizing to a first target sequence in the cell, (iii) a second guide RNA capable of hybridizing to the vector which encodes the CRISPR enzyme. Similarly, the enzyme can include one or more NLS, etc.

[0617] The various coding sequences (CRISPR enzyme, guide RNAs) can be included on a single vector or on multiple vectors. For instance, it is possible to encode the enzyme on one vector and the various RNA sequences on another vector, or to encode the enzyme and one gRNA on one vector, and the remaining gRNA on another vector, or any other permutation. In general, a system using a total of one or two different vectors is preferred.

[0618] Where multiple vectors are used, it is possible to deliver them in unequal numbers, and ideally with an excess of a vector which encodes the first guide RNA relative to the second guide RNA, thereby assisting in delaying final inactivation of the CRISPR system until genome editing has had a chance to occur.

[0619] The first guide RNA can target any target sequence of interest within a genome, as described elsewhere herein. The second guide RNA targets a sequence within the vector which encodes the CRISPR Cas9 enzyme, and thereby inactivates the enzyme's expression from that vector. Thus the target sequence in the vector must be capable of inactivating expression. Suitable target sequences can be, for instance, near to or within the translational start codon for the Cpf1 coding sequence, in a non-coding sequence in the promoter driving expression of the non-coding RNA elements, within the promoter driving expression of the Cpf1 gene, within 100 bp of the ATG translational start codon in the Cpf1 coding sequence, and/or within the inverted terminal repeat (iTR) of a viral delivery vector, e.g., in the AAV genome. A double stranded break near this region can induce a frame shift in the Cpf1 coding sequence, causing a loss of protein expression. An alternative target sequence for the “self-inactivating” guide RNA would aim to edit/inactivate regulatory regions/sequences needed for the expression of the CRISPR-Cpf1 system or for the stability of the vector. For instance, if the promoter for the Cpf1 coding sequence is disrupted then transcription can be inhibited or prevented. Similarly, if a vector includes sequences for replication, maintenance or stability then it is possible to target these. For instance, in a AAV vector a useful target sequence is within the iTR. Other useful sequences to target can be promoter sequences, polyadenlyation sites, etc.

[0620] Furthermore, if the guide RNAs are expressed in array format, the “self-inactivating” guide RNAs that target both promoters simultaneously will result in the excision of the intervening nucleotides from within the CRISPR-Cas expression construct, effectively leading to its complete inactivation. Similarly, excision of the intervening nucleotides will result where the guide RNAs target both ITRs, or targets two or more other CRISPR-Cas components simultaneously. Self-inactivation as explained herein is applicable, in general, with CRISPR-Cpf1 systems in order to provide regulation of the CRISPR-Cpf1. For example, self-inactivation as explained herein may be applied to the CRISPR repair of mutations, for example expansion disorders, as explained herein. As a result of this self-inactivation, CRISPR repair is only transiently active.

[0621] Addition of non-targeting nucleotides to the 5′ end (e.g. 1-10 nucleotides, preferably 1-5 nucleotides) of the “self-inactivating” guide RNA can be used to delay its processing and/or modify its efficiency as a means of ensuring editing at the targeted genomic locus prior to CRISPR-Cpf1 shutdown.

[0622] In one aspect of the self-inactivating AAV-CRISPR-Cpf1 system, plasmids that co-express one or more gRNA targeting genomic sequences of interest (e.g. 1-2, 1-5, 1-10, 1-15, 1-20, 1-30) may be established with “self-inactivating” gRNAs that target an LbCpf1 sequence at or near the engineered ATG start site (e.g. within 5 nucleotides, within 15 nucleotides, within 30 nucleotides, within 50 nucleotides, within 100 nucleotides). A regulatory sequence in the U6 promoter region can also be targeted with an gRNA. The U6-driven gRNAs may be designed in an array format such that multiple gRNA sequences can be simultaneously released. When first delivered into target tissue/cells (left cell) gRNAs begin to accumulate while Cpf1 levels rise in the nucleus. Cpf1 complexes with all of the gRNAs to mediate genome editing and self-inactivation of the CRISPR-Cpf1 plasmids.

[0623] One aspect of a self-inactivating CRISPR-Cpf1 system is expression of singly or in tandem array format from 1 up to 4 or more different guide sequences; e.g. up to about 20 or about 30 guides sequences. Each individual self inactivating guide sequence may target a different target. Such may be processed from, e.g. one chimeric pol3 transcript. Pol3 promoters such as U6 or H1 promoters may be used. Pol2 promoters such as those mentioned throughout herein. Inverted terminal repeat (iTR) sequences may flank the Pol3 promoter-gRNA(s)-Pol2 promoter-Cpf1.

[0624] One aspect of a chimeric, tandem array transcript is that one or more guide(s) edit the one or more target(s) while one or more self inactivating guides inactivate the CRISPR/Cpf1 system. Thus, for example, the described CRISPR-Cpf1 system for repairing expansion disorders may be directly combined with the self-inactivating CRISPR-Cpf1 system described herein. Such a system may, for example, have two guides directed to the target region for repair as well as at least a third guide directed to self-inactivation of the CRISPR-Cpf1. Reference is made to Application Ser. No. PCT/US2014/069897, entitled “Compositions And Methods Of Use Of Crispr-Cas Systems In Nucleotide Repeat Disorders,” published Dec. 12, 2014 as WO/2015/089351.

Gene Editing or Altering a Target Loci with Cpf1

[0625] The double strand break or single strand break in one of the strands advantageously should be sufficiently close to target position such that correction occurs. In an embodiment, the distance is not more than 50, 100, 200, 300, 350 or 400 nucleotides. While not wishing to be bound by theory, it is believed that the break should be sufficiently close to target position such that the break is within the region that is subject to exonuclease-mediated removal during end resection. If the distance between the target position and a break is too great, the mutation may not be included in the end resection and, therefore, may not be corrected, as the template nucleic acid sequence may only be used to correct sequence within the end resection region.

[0626] In an embodiment, in which a guide RNA and a Type V/Type VI molecule, in particular Cpf1/C2c1/C2c2 or an ortholog or homolog thereof, preferably a Cpf1 nuclease induce a double strand break for the purpose of inducing HDR-mediated correction, the cleavage site is between 0-200 bp (e.g., 0 to 175, 0 to 150, 0 to 125, 0 to 100, 0 to 75, 0 to 50, 0 to 25, 25 to 200, 25 to 175, 25 to 150, 25 to 125, 25 to 100, 25 to 75, 25 to 50, 50 to 200, 50 to 175, 50 to 150, 50 to 125, 50 to 100, 50 to 75, 75 to 200, 75 to 175, 75 to 150, 75 to 125, 75 to 100 bp) away from the target position. In an embodiment, the cleavage site is between 0-100 bp (e.g., 0 to 75, 0 to 50, 0 to 25, 25 to 100, 25 to 75, 25 to 50, 50 to 100, 50 to 75 or 75 to 100 bp) away from the target position. In a further embodiment, two or more guide RNAs complexing with Cpf1 or an ortholog or homolog thereof, may be used to induce multiplexed breaks for purpose of inducing HDR-mediated correction.

[0627] The homology arm should extend at least as far as the region in which end resection may occur, e.g., in order to allow the resected single stranded overhang to find a complementary region within the donor template. The overall length could be limited by parameters such as plasmid size or viral packaging limits. In an embodiment, a homology arm may not extend into repeated elements. Exemplary homology arm lengths include a least 50, 100, 250, 500, 750 or 1000 nucleotides.

[0628] Target position, as used herein, refers to a site on a target nucleic acid or target gene (e.g., the chromosome) that is modified by a Type V/Type VI, in particular Cpf1/C2c1/C2c2 or an ortholog or homolog thereof, preferably Cpf1 molecule-dependent process. For example, the target position can be a modified Cpf1 molecule cleavage of the target nucleic acid and template nucleic acid directed modification, e.g., correction, of the target position. In an embodiment, a target position can be a site between two nucleotides, e.g., adjacent nucleotides, on the target nucleic acid into which one or more nucleotides is added. The target position may comprise one or more nucleotides that are altered, e.g., corrected, by a template nucleic acid. In an embodiment, the target position is within a target sequence (e.g., the sequence to which the guide RNA binds). In an embodiment, a target position is upstream or downstream of a target sequence (e.g., the sequence to which the guide RNA binds).

[0629] A template nucleic acid, as that term is used herein, refers to a nucleic acid sequence which can be used in conjunction with a Type V/Type VI molecule, in particular Cpf1/C2c1/C2c2 or an ortholog or homolog thereof, preferably a Cpf1 molecule and a guide RNA molecule to alter the structure of a target position. In an embodiment, the target nucleic acid is modified to have some or all of the sequence of the template nucleic acid, typically at or near cleavage site(s). In an embodiment, the template nucleic acid is single stranded. In an alternate embodiment, the template nucleic acid is double stranded. In an embodiment, the template nucleic acid is DNA, e.g., double stranded DNA. In an alternate embodiment, the template nucleic acid is single stranded DNA.

[0630] In an embodiment, the template nucleic acid alters the structure of the target position by participating in homologous recombination. In an embodiment, the template nucleic acid alters the sequence of the target position. In an embodiment, the template nucleic acid results in the incorporation of a modified, or non-naturally occurring base into the target nucleic acid.

[0631] The template sequence may undergo a breakage mediated or catalyzed recombination with the target sequence. In an embodiment, the template nucleic acid may include sequence that corresponds to a site on the target sequence that is cleaved by an Cpf1 mediated cleavage event. In an embodiment, the template nucleic acid may include sequence that corresponds to both, a first site on the target sequence that is cleaved in a first Cpf1 mediated event, and a second site on the target sequence that is cleaved in a second Cpf1 mediated event.

[0632] In certain embodiments, the template nucleic acid can include sequence which results in an alteration in the coding sequence of a translated sequence, e.g., one which results in the substitution of one amino acid for another in a protein product, e.g., transforming a mutant allele into a wild type allele, transforming a wild type allele into a mutant allele, and/or introducing a stop codon, insertion of an amino acid residue, deletion of an amino acid residue, or a nonsense mutation. In certain embodiments, the template nucleic acid can include sequence which results in an alteration in a non-coding sequence, e.g., an alteration in an exon or in a 5′ or 3′ non-translated or non-transcribed region. Such alterations include an alteration in a control element, e.g., a promoter, enhancer, and an alteration in a cis-acting or trans-acting control element.

[0633] A template nucleic acid having homology with a target position in a target gene may be used to alter the structure of a target sequence. The template sequence may be used to alter an unwanted structure, e.g., an unwanted or mutant nucleotide. The template nucleic acid may include sequence which, when integrated, results in: decreasing the activity of a positive control element; increasing the activity of a positive control element; decreasing the activity of a negative control element; increasing the activity of a negative control element; decreasing the expression of a gene; increasing the expression of a gene; increasing resistance to a disorder or disease; increasing resistance to viral entry; correcting a mutation or altering an unwanted amino acid residue conferring, increasing, abolishing or decreasing a biological property of a gene product, e.g., increasing the enzymatic activity of an enzyme, or increasing the ability of a gene product to interact with another molecule.

[0634] The template nucleic acid may include sequence which results in: a change in sequence of 1, 2, 3, 4, 5, 6, 7, 8, 9, 10, 11, 12 or more nucleotides of the target sequence. In an embodiment, the template nucleic acid may be 20+/−10, 30+/−10, 40+/−10, 50+/−10, 60+/−10, 70+/−10, 80+/−10, 90+/−10, 100+/−10, 110+/−10, 120+/−10, 130+/−10, 140+/−10, 150+/−10, 160+/−10, 170+/−10, 180+/−10, 190+/−10, 200+/−10, 210+/−10, of 220+/−10 nucleotides in length. In an embodiment, the template nucleic acid may be 30+/−20, 40+/−20, 50+/−20, 60+/−20, 70+/−20, 80+/−20, 90+/−20, 100+/−20, 1 10+/−20, 120+/−20, 130+/−20, 140+/−20, I 50+/−20, 160+/−20, 170+/−20, 180+/−20, 190+/−20, 200+/−20, 210+/−20, of 220+/−20 nucleotides in length. In an embodiment, the template nucleic acid is 10 to 1,000, 20 to 900, 30 to 800, 40 to 700, 50 to 600, 50 to 500, 50 to 400, 50 to 300, 50 to 200, or 50 to 100 nucleotides in length.

[0635] A template nucleic acid comprises the following components: [5′ homology arm]-[replacement sequence]-[3′ homology arm]. The homology arms provide for recombination into the chromosome, thus replacing the undesired element, e.g., a mutation or signature, with the replacement sequence. In an embodiment, the homology arms flank the most distal cleavage sites. In an embodiment, the 3′ end of the 5′ homology arm is the position next to the 5′ end of the replacement sequence. In an embodiment, the 5′ homology arm can extend at least 10, 20, 30, 40, 50, 100, 200, 300, 400, 500, 600, 700, 800, 900, 1000, 1500, or 2000 nucleotides 5′ from the 5′ end of the replacement sequence. In an embodiment, the 5′ end of the 3′ homology arm is the position next to the 3′ end of the replacement sequence. In an embodiment, the 3′ homology arm can extend at least 10, 20, 30, 40, 50, 100, 200, 300, 400, 500, 600, 700, 800, 900, 1000, 1500, or 2000 nucleotides 3′ from the 3′ end of the replacement sequence.

[0636] In certain embodiments, one or both homology arms may be shortened to avoid including certain sequence repeat elements. For example, a 5′ homology arm may be shortened to avoid a sequence repeat element. In other embodiments, a 3′ homology arm may be shortened to avoid a sequence repeat element. In some embodiments, both the 5′ and the 3′ homology arms may be shortened to avoid including certain sequence repeat elements.

[0637] In certain embodiments, a template nucleic acids for correcting a mutation may designed for use as a single-stranded oligonucleotide. When using a single-stranded oligonucleotide, 5′ and 3′ homology arms may range up to about 200 base pairs (bp) in length, e.g., at least 25, 50, 75, 100, 125, 150, 175, or 200 bp in length.

### Cpf1 Effector Protein Complex System Promoted Non-Homologous End-Joining

[0638] In certain embodiments, nuclease-induced non-homologous end-joining (NHEJ) can be used to target gene-specific knockouts. Nuclease-induced NHEJ can also be used to remove (e.g., delete) sequence in a gene of interest. Generally, NHEJ repairs a double-strand break in the DNA by joining together the two ends; however, generally, the original sequence is restored only if two compatible ends, exactly as they were formed by the double-strand break, are perfectly ligated. The DNA ends of the double-strand break are frequently the subject of enzymatic processing, resulting in the addition or removal of nucleotides, at one or both strands, prior to rejoining of the ends. This results in the presence of insertion and/or deletion (indel) mutations in the DNA sequence at the site of the NHEJ repair. Two-thirds of these mutations typically alter the reading frame and, therefore, produce a non-functional protein. Additionally, mutations that maintain the reading frame, but which insert or delete a significant amount of sequence, can destroy functionality of the protein. This is locus dependent as mutations in critical functional domains are likely less tolerable than mutations in non-critical regions of the protein. The indel mutations generated by NHEJ are unpredictable in nature; however, at a given break site certain indel sequences are favored and are over represented in the population, likely due to small regions of microhomology. The lengths of deletions can vary widely; most commonly in the 1-50 bp range, but they can easily be greater than 50 bp, e.g., they can easily reach greater than about 100-200 bp. Insertions tend to be shorter and often include short duplications of the sequence immediately surrounding the break site. However, it is possible to obtain large insertions, and in these cases, the inserted sequence has often been traced to other regions of the genome or to plasmid DNA present in the cells.

[0639] Because NHEJ is a mutagenic process, it may also be used to delete small sequence motifs as long as the generation of a specific final sequence is not required. If a double-strand break is targeted near to a short target sequence, the deletion mutations caused by the NHEJ repair often span, and therefore remove, the unwanted nucleotides. For the deletion of larger DNA segments, introducing two double-strand breaks, one on each side of the sequence, can result in NHEJ between the ends with removal of the entire intervening sequence. Both of these approaches can be used to delete specific DNA sequences; however, the error-prone nature of NHEJ may still produce indel mutations at the site of repair.

[0640] Both double strand cleaving Type V/Type VI molecule, in particular Cpf1/C2c1/C2c2 or an ortholog or homolog thereof, preferably Cpf1 molecules and single strand, or nickase, Type V/Type VI molecule, in particular Cpf1/C2c1/C2c2 or an ortholog or homolog thereof, preferably Cpf1 molecules can be used in the methods and compositions described herein to generate NHEJ-mediated indels. NHEJ-mediated indels targeted to the gene, e.g., a coding region, e.g., an early coding region of a gene of interest can be used to knockout (i.e., eliminate expression of) a gene of interest. For example, early coding region of a gene of interest includes sequence immediately following a transcription start site, within a first exon of the coding sequence, or within 500 bp of the transcription start site (e.g., less than 500, 450, 400, 350, 300, 250, 200, 150, 100 or 50 bp).

[0641] In an embodiment, in which a guide RNA and Type V/Type VI molecule, in particular Cpf1/C2c1/C2c2 or an ortholog or homolog thereof, preferably Cpf1 nuclease generate a double strand break for the purpose of inducing NHEJ-mediated indels, a guide RNA may be configured to position one double-strand break in close proximity to a nucleotide of the target position. In an embodiment, the cleavage site may be between 0-500 bp away from the target position (e.g., less than 500, 400, 300, 200, 100, 50, 40, 30, 25, 20, 15, 10, 9, 8, 7, 6, 5, 4, 3, 2 or 1 bp from the target position).

[0642] In an embodiment, in which two guide RNAs complexing with Type V/Type VI molecules, in particular Cpf1/C2c1/C2c2 or an ortholog or homolog thereof, preferably Cpf1 nickases induce two single strand breaks for the purpose of inducing NHEJ-mediated indels, two guide RNAs may be configured to position two single-strand breaks to provide for NHEJ repair a nucleotide of the target position.

### Cpf1 Effector Protein Complexes can Deliver Functional Effectors

[0643] Unlike CRISPR-Cas-mediated gene knockout, which permanently eliminates expression by mutating the gene at the DNA level, CRISPR-Cas knockdown allows for temporary reduction of gene expression through the use of artificial transcription factors. Mutating key residues in both DNA cleavage domains of the Cpf1 protein, such as FnCpf1 protein (e.g. the D917A and H1006A mutations) results in the generation of a catalytically inactive Cpf1. A catalytically inactive Cpf1 complexes with a guide RNA and localizes to the DNA sequence specified by that guide RNA's targeting domain, however, it does not cleave the target DNA. Fusion of the inactive Cpf1 protein, such as FnCpf1 protein (e.g. the D917A and H1006A mutations) to an effector domain, e.g., a transcription repression domain, enables recruitment of the effector to any DNA site specified by the guide RNA. In certain embodiments, Cpf1 may be fused to a transcriptional repression domain and recruited to the promoter region of a gene. Especially for gene repression, it is contemplated herein that blocking the binding site of an endogenous transcription factor would aid in downregulating gene expression. In another embodiment, an inactive Cpf1 can be fused to a chromatin modifying protein. Altering chromatin status can result in decreased expression of the target gene.

[0644] In an embodiment, a guide RNA molecule can be targeted to a known transcription response elements (e.g., promoters, enhancers, etc.), a known upstream activating sequences, and/or sequences of unknown or known function that are suspected of being able to control expression of the target DNA.

[0645] In some methods, a target polynucleotide can be inactivated to effect the modification of the expression in a cell. For example, upon the binding of a CRISPR complex to a target sequence in a cell, the target polynucleotide is inactivated such that the sequence is not transcribed, the coded protein is not produced, or the sequence does not function as the wild-type sequence does. For example, a protein or microRNA coding sequence may be inactivated such that the protein is not produced.

[0646] In certain embodiments, the CRISPR enzyme comprises one or more mutations selected from the group consisting of D917A, E1006A and D1225A and/or the one or more mutations is in a RuvC domain of the CRISPR enzyme or is a mutation as otherwise as discussed herein. In some embodiments, the CRISPR enzyme has one or more mutations in a catalytic domain, wherein when transcribed, the direct repeat sequence forms a single stem loop and the guide sequence directs sequence-specific binding of a CRISPR complex to the target sequence, and wherein the enzyme further comprises a functional domain. In some embodiments, the functional domain is a transcriptional activation domain, preferably VP64. In some embodiments, the functional domain is a transcription repression domain, preferably KRAB. In some embodiments, the transcription repression domain is SID, or concatemers of SID (eg SID4X). In some embodiments, the functional domain is an epigenetic modifying domain, such that an epigenetic modifying enzyme is provided. In some embodiments, the functional domain is an activation domain, which may be the P65 activation domain.

### Delivery of the Cpf1 Effector Protein Complex or Components Thereof

[0647] Through this disclosure and the knowledge in the art, CRISPR-Cas system, specifically the novel CRISPR systems described herein, or components thereof or nucleic acid molecules thereof (including, for instance HDR template) or nucleic acid molecules encoding or providing components thereof may be delivered by a delivery system herein described both generally and in detail.

[0648] Vector delivery, e.g., plasmid, viral delivery: The CRISPR enzyme, for instance a Cpf1, and/or any of the present RNAs, for instance a guide RNA, can be delivered using any suitable vector, e.g., plasmid or viral vectors, such as adeno associated virus (AAV), lentivirus, adenovirus or other viral vector types, or combinations thereof. Cpf1 and one or more guide RNAs can be packaged into one or more vectors, e.g., plasmid or viral vectors. In some embodiments, the vector, e.g., plasmid or viral vector is delivered to the tissue of interest by, for example, an intramuscular injection, while other times the delivery is via intravenous, transdermal, intranasal, oral, mucosal, or other delivery methods. Such delivery may be either via a single dose, or multiple doses. One skilled in the art understands that the actual dosage to be delivered herein may vary greatly depending upon a variety of factors, such as the vector choice, the target cell, organism, or tissue, the general condition of the subject to be treated, the degree of transformation/modification sought, the administration route, the administration mode, the type of transformation/modification sought, etc.

[0649] Such a dosage may further contain, for example, a carrier (water, saline, ethanol, glycerol, lactose, sucrose, calcium phosphate, gelatin, dextran, agar, pectin, peanut oil, sesame oil, etc.), a diluent, a pharmaceutically-acceptable carrier (e.g., phosphate-buffered saline), a pharmaceutically-acceptable excipient, and/or other compounds known in the art. The dosage may further contain one or more pharmaceutically acceptable salts such as, for example, a mineral acid salt such as a hydrochloride, a hydrobromide, a phosphate, a sulfate, etc.; and the salts of organic acids such as acetates, propionates, malonates, benzoates, etc. Additionally, auxiliary substances, such as wetting or emulsifying agents, pH buffering substances, gels or gelling materials, flavorings, colorants, microspheres, polymers, suspension agents, etc. may also be present herein. In addition, one or more other conventional pharmaceutical ingredients, such as preservatives, humectants, suspending agents, surfactants, antioxidants, anticaking agents, fillers, chelating agents, coating agents, chemical stabilizers, etc. may also be present, especially if the dosage form is a reconstitutable form. Suitable exemplary ingredients include microcrystalline cellulose, carboxymethylcellulose sodium, polysorbate 80, phenylethyl alcohol, chlorobutanol, potassium sorbate, sorbic acid, sulfur dioxide, propyl gallate, the parabens, ethyl vanillin, glycerin, phenol, parachlorophenol, gelatin, albumin and a combination thereof. A thorough discussion of pharmaceutically acceptable excipients is available in REMINGTON'S PHARMACEUTICAL SCIENCES (Mack Pub. Co., N.J. 1991) which is incorporated by reference herein.

[0650] In an embodiment herein the delivery is via an adenovirus, which may be at a single booster dose containing at least 1×10⁵ particles (also referred to as particle units, pu) of adenoviral vector. In an embodiment herein, the dose preferably is at least about 1×10⁶ particles (for example, about 1×10⁶-1×10¹² particles), more preferably at least about 1×10⁷ particles, more preferably at least about 1×10⁸ particles (e.g., about 1×10⁸-1×10¹¹ particles or about 1×10⁸-1×10¹² particles), and most preferably at least about 1×10⁰ particles (e.g., about 1×10⁹-1×10¹⁰ particles or about 1×10⁹-1×10¹² particles), or even at least about 1×10¹⁰ particles (e.g., about 1×10¹⁰-1×10¹² particles) of the adenoviral vector. Alternatively, the dose comprises no more than about 1×10¹⁴ particles, preferably no more than about 1×10¹³ particles, even more preferably no more than about 1×10¹² particles, even more preferably no more than about 1×10¹¹ particles, and most preferably no more than about 1×10¹⁰ particles (e.g., no more than about 1×10⁹ articles). Thus, the dose may contain a single dose of adenoviral vector with, for example, about 1×10⁶ particle units (pu), about 2×10⁶ pu, about 4×10⁶ pu, about 1×10⁷ pu, about 2×10⁷ pu, about 4×10⁷ pu, about 1×10⁸ pu, about 2×10⁸ pu, about 4×10⁸ pu, about 1×10⁹ pu, about 2×10⁹ pu, about 4×10⁹ pu, about 1×10¹⁰ pu, about 2×10¹⁰ pu, about 4×10¹⁰ pu, about 1×10¹¹ pu, about 2×10¹¹ pu, about 4×10¹¹ pu, about 1×10¹² pu, about 2×10¹² pu, or about 4×10¹² pu of adenoviral vector. See, for example, the adenoviral vectors in U.S. Pat. No. 8,454,972 B2 to Nabel, et. al., granted on Jun. 4, 2013; incorporated by reference herein, and the dosages at col 29, lines 36-58 thereof. In an embodiment herein, the adenovirus is delivered via multiple doses.

[0651] In an embodiment herein, the delivery is via an AAV. A therapeutically effective dosage for in vivo delivery of the AAV to a human is believed to be in the range of from about 20 to about 50 ml of saline solution containing from about 1×10¹⁰ to about 1×10¹⁰ functional AAV/ml solution. The dosage may be adjusted to balance the therapeutic benefit against any side effects. In an embodiment herein, the AAV dose is generally in the range of concentrations of from about 1×10⁵ to 1×10⁵⁰ genomes AAV, from about 1×10⁸ to 1×10²⁰ genomes AAV, from about 1×10¹⁰ to about 1×10¹⁶ genomes, or about 1×10¹¹ to about 1×10¹⁶ genomes AAV. A human dosage may be about 1×10¹³ genomes AAV. Such concentrations may be delivered in from about 0.001 ml to about 100 ml, about 0.05 to about 50 ml, or about 10 to about 25 ml of a carrier solution. Other effective dosages can be readily established by one of ordinary skill in the art through routine trials establishing dose response curves. See, for example, U.S. Pat. No. 8,404,658 B2 to Hajjar, et al., granted on Mar. 26, 2013, at col. 27, lines 45-60.

[0652] In an embodiment herein the delivery is via a plasmid. In such plasmid compositions, the dosage should be a sufficient amount of plasmid to elicit a response. For instance, suitable quantities of plasmid DNA in plasmid compositions can be from about 0.1 to about 2 mg, or from about 1 μg to about 10 μg per 70 kg individual. Plasmids of the invention will generally comprise (i) a promoter; (ii) a sequence encoding a CRISPR enzyme, operably linked to said promoter; (iii) a selectable marker; (iv) an origin of replication; and (v) a transcription terminator downstream of and operably linked to (ii). The plasmid can also encode the RNA components of a CRISPR complex, but one or more of these may instead be encoded on a different vector.

[0653] The doses herein are based on an average 70 kg individual. The frequency of administration is within the ambit of the medical or veterinary practitioner (e.g., physician, veterinarian), or scientist skilled in the art. It is also noted that mice used in experiments are typically about 20 g and from mice experiments one can scale up to a 70 kg individual.

[0654] In some embodiments the RNA molecules of the invention are delivered in liposome or lipofectin formulations and the like and can be prepared by methods well known to those skilled in the art. Such methods are described, for example, in U.S. Pat. Nos. 5,593,972, 5,589,466, and 5,580,859, which are herein incorporated by reference. Delivery systems aimed specifically at the enhanced and improved delivery of siRNA into mammalian cells have been developed, (see, for example, Shen et al FEBS Let. 2003, 539:111-114; Xia et al., Nat. Biotech. 2002, 20:1006-1010; Reich et al., Mol. Vision. 2003, 9: 210-216; Sorensen et al., J. Mol. Biol. 2003, 327: 761-766; Lewis et al., Nat. Gen. 2002, 32: 107-108 and Simeoni et al., NAR 2003, 31, 11: 2717-2724) and may be applied to the present invention. siRNA has recently been successfully used for inhibition of gene expression in primates (see for example. Tolentino et al., Retina 24(4):660 which may also be applied to the present invention.

[0655] Indeed, RNA delivery is a useful method of in vivo delivery. It is possible to deliver Cpf1 and gRNA (and, for instance, HR repair template) into cells using liposomes or nanoparticles. Thus delivery of the CRISPR enzyme, such as a Cpf1 and/or delivery of the RNAs of the invention may be in RNA form and via microvesicles, liposomes or particle or particles. For example, Cpf1 mRNA and gRNA can be packaged into liposomal particles for delivery in vivo. Liposomal transfection reagents such as lipofectamine from Life Technologies and other reagents on the market can effectively deliver RNA molecules into the liver.

[0656] Means of delivery of RNA also preferred include delivery of RNA via particles or particles (Cho, S., Goldberg, M., Son, S., Xu, Q., Yang, F., Mei, Y., Bogatyrev, S., Langer, R. and Anderson, D., Lipid-like nanoparticles for small interfering RNA delivery to endothelial cells, Advanced Functional Materials, 19: 3112-3118, 2010) or exosomes (Schroeder, A., Levins, C., Cortez, C., Langer, R., and Anderson, D., Lipid-based nanotherapeutics for siRNA delivery, Journal of Internal Medicine, 267: 9-21, 2010, PMID: 20059641). Indeed, exosomes have been shown to be particularly useful in delivery siRNA, a system with some parallels to the CRISPR system. For instance, El-Andaloussi S, et al. (“Exosome-mediated delivery of siRNA in vitro and in vivo.” Nat Protoc. 2012 December; 7(12):2112-26. doi: 10.1038/nprot.2012.131. Epub 2012 Nov. 15.) describe how exosomes are promising tools for drug delivery across different biological barriers and can be harnessed for delivery of siRNA in vitro and in vivo. Their approach is to generate targeted exosomes through transfection of an expression vector, comprising an exosomal protein fused with a peptide ligand. The exosomes are then purify and characterized from transfected cell supernatant, then RNA is loaded into the exosomes. Delivery or administration according to the invention can be performed with exosomes, in particular but not limited to the brain. Vitamin E (α-tocopherol) may be conjugated with CRISPR Cas and delivered to the brain along with high density lipoprotein (HDL), for example in a similar manner as was done by Uno et al. (HUMAN GENE THERAPY 22:711-719 (June 2011)) for delivering short-interfering RNA (siRNA) to the brain. Mice were infused via Osmotic minipumps (model 1007D; Alzet, Cupertino, Calif.) filled with phosphate-buffered saline (PBS) or free TocsiBACE or Toc-siBACE/HDL and connected with Brain Infusion Kit 3 (Alzet). A brain-infusion cannula was placed about 0.5 mm posterior to the bregma at midline for infusion into the dorsal third ventricle. Uno et al. found that as little as 3 nmol of Toc-siRNA with HDL could induce a target reduction in comparable degree by the same ICV infusion method. A similar dosage of CRISPR Cas conjugated to α-tocopherol and co-administered with HDL targeted to the brain may be contemplated for humans in the present invention, for example, about 3 nmol to about 3 μmol of CRISPR Cas targeted to the brain may be contemplated. Zou et al. ((HUMAN GENE THERAPY 22:465-475 (April 2011)) describes a method of lentiviral-mediated delivery of short-hairpin RNAs targeting PKCγ for in vivo gene silencing in the spinal cord of rats. Zou et al. administered about 10 μl of a recombinant lentivirus having a titer of 1×10⁹ transducing units (TU)/ml by an intrathecal catheter. A similar dosage of CRISPR Cas expressed in a lentiviral vector targeted to the brain may be contemplated for humans in the present invention, for example, about 10-50 ml of CRISPR Cas targeted to the brain in a lentivirus having a titer of 1×10⁹ transducing units (TU)/ml may be contemplated.

[0657] In terms of local delivery to the brain, this can be achieved in various ways. For instance, material can be delivered intrastriatally e.g. by injection. Injection can be performed stereotactically via a craniotomy.

[0658] Enhancing NHEJ or HR efficiency is also helpful for delivery. It is preferred that NHEJ efficiency is enhanced by co-expressing end-processing enzymes such as Trex2 (Dumitrache et al. Genetics. 2011 August; 188(4): 787-797). It is preferred that HR efficiency is increased by transiently inhibiting NHEJ machineries such as Ku70 and Ku86. HR efficiency can also be increased by co-expressing prokaryotic or eukaryotic homologous recombination enzymes such as RecBCD, RecA.

### Packaging and Promoters

[0659] Ways to package inventive Cpf1 coding nucleic acid molecules, e.g., DNA, into vectors, e.g., viral vectors, to mediate genome modification in vivo include:
[0660] To achieve NHEJ-mediated gene knockout:
[0661] Single virus vector:
[0662] Vector containing two or more expression cassettes:
[0663] Promoter-Cpf1 coding nucleic acid molecule-terminator
[0664] Promoter-gRNA1-terminator
[0665] Promoter-gRNA2-terminator
[0666] Promoter-gRNA(N)-terminator (up to size limit of vector)
[0667] Double virus vector:
[0668] Vector 1 containing one expression cassette for driving the expression of Cpf1
[0669] Promoter-Cpf1 coding nucleic acid molecule-terminator
[0670] Vector 2 containing one more expression cassettes for driving the expression of one or more guideRNAs
[0671] Promoter-gRNA1-terminator
[0672] Promoter-gRNA(N)-terminator (up to size limit of vector)
[0673] To mediate homology-directed repair.
[0674] In addition to the single and double virus vector approaches described above, an additional vector can be used to deliver a homology-direct repair template.

[0675] The promoter used to drive Cpf1 coding nucleic acid molecule expression can include:

[0676] AAV ITR can serve as a promoter: this is advantageous for eliminating the need for an additional promoter element (which can take up space in the vector). The additional space freed up can be used to drive the expression of additional elements (gRNA, etc.). Also, ITR activity is relatively weaker, so can be used to reduce potential toxicity due to over expression of Cpf1.

[0677] For ubiquitous expression, promoters that can be used include: CMV, CAG, CBh, PGK, SV40, Ferritin heavy or light chains, etc.

[0678] For brain or other CNS expression, can use promoters: SynapsinI for all neurons, CaMKIIalpha for excitatory neurons, GAD67 or GAD65 or VGAT for GABAergic neurons, etc.

[0679] For liver expression, can use Albumin promoter.

[0680] For lung expression, can use SP-B.

[0681] For endothelial cells, can use ICAM.

[0682] For hematopoietic cells can use IFNbeta or CD45.

[0683] For Osteoblasts can one can use the OG-2.

[0684] The promoter used to drive guide RNA can include:

[0685] Pol III promoters such as U6 or H1

[0686] Use of Pol II promoter and intronic cassettes to express gRNA

### Adeno Associated Virus (AAV)

[0687] Cpf1 and one or more guide RNA can be delivered using adeno associated virus (AAV), lentivirus, adenovirus or other plasmid or viral vector types, in particular, using formulations and doses from, for example, U.S. Pat. No. 8,454,972 (formulations, doses for adenovirus), U.S. Pat. No. 8,404,658 (formulations, doses for AAV) and U.S. Pat. No. 5,846,946 (formulations, doses for DNA plasmids) and from clinical trials and publications regarding the clinical trials involving lentivirus, AAV and adenovirus. For examples, for AAV, the route of administration, formulation and dose can be as in U.S. Pat. No. 8,454,972 and as in clinical trials involving AAV. For Adenovirus, the route of administration, formulation and dose can be as in U.S. Pat. No. 8,404,658 and as in clinical trials involving adenovirus. For plasmid delivery, the route of administration, formulation and dose can be as in U.S. Pat. No. 5,846,946 and as in clinical studies involving plasmids. Doses may be based on or extrapolated to an average 70 kg individual (e.g. a male adult human), and can be adjusted for patients, subjects, mammals of different weight and species. Frequency of administration is within the ambit of the medical or veterinary practitioner (e.g., physician, veterinarian), depending on usual factors including the age, sex, general health, other conditions of the patient or subject and the particular condition or symptoms being addressed. The viral vectors can be injected into the tissue of interest. For cell-type specific genome modification, the expression of Cpf1 can be driven by a cell-type specific promoter. For example, liver-specific expression might use the Albumin promoter and neuron-specific expression (e.g. for targeting CNS disorders) might use the Synapsin I promoter.

[0688] In terms of in vivo delivery, AAV is advantageous over other viral vectors for a couple of reasons:
[0689] Low toxicity (this may be due to the purification method not requiring ultra centrifugation of cell particles that can activate the immune response) and
[0690] Low probability of causing insertional mutagenesis because it doesn't integrate into the host genome.

[0691] AAV has a packaging limit of 4.5 or 4.75 Kb. This means that Cpf1 as well as a promoter and transcription terminator have to be all fit into the same viral vector. Constructs larger than 4.5 or 4.75 Kb will lead to significantly reduced virus production. SpCas9 is quite large, the gene itself is over 4.1 Kb, which makes it difficult for packing into AAV. Therefore embodiments of the invention include utilizing homologs of Cpf1 that are shorter.

[0692] As to AAV, the AAV can be AAV1, AAV2, AAV5 or any combination thereof. One can select the AAV of the AAV with regard to the cells to be targeted; e.g., one can select AAV serotypes 1, 2, 5 or a hybrid capsid AAV1, AAV2, AAV5 or any combination thereof for targeting brain or neuronal cells; and one can select AAV4 for targeting cardiac tissue. AAV8 is useful for delivery to the liver. The herein promoters and vectors are preferred individually. A tabulation of certain AAV serotypes as to these cells (see Grimm, D. et al, J. Virol. 82: 5887-5911 (2008)) is as follows:

| | AAV- | AAV- | AAV- | AAV- | AAV- | AAV- | AAV- | AAV- |
|---|---|---|---|---|---|---|---|---|
| Cell Line | 1 | 2 | 3 | 4 | 5 | 6 | 8 | 9 |
| Huh-7 | 13 | 100 | 2.5 | 0.0 | 0.1 | 10 | 0.7 | 0.0 |
| HEK293 | 25 | 100 | 2.5 | 0.1 | 0.1 | 5 | 0.7 | 0.1 |
| HeLa | 3 | 100 | 2.0 | 0.1 | 6.7 | 1 | 0.2 | 0.1 |
| HepG2 | 3 | 100 | 16.7 | 0.3 | 1.7 | 5 | 0.3 | ND |
| Hep1A | 20 | 100 | 0.2 | 1.0 | 0.1 | 1 | 0.2 | 0.0 |
| 911 | 17 | 100 | 11 | 0.2 | 0.1 | 17 | 0.1 | ND |
| CHO | 100 | 100 | 14 | 1.4 | 333 | 50 | 10 | 1.0 |
| COS | 33 | 100 | 33 | 3.3 | 5.0 | 14 | 2.0 | 0.5 |
| MeWo | 10 | 100 | 20 | 0.3 | 6.7 | 10 | 1.0 | 0.2 |
| NIH3T3 | 10 | 100 | 2.9 | 2.9 | 0.3 | 10 | 0.3 | ND |
| A549 | 14 | 100 | 20 | ND | 0.5 | 10 | 0.5 | 0.1 |
| HT1180 | 20 | 100 | 10 | 0.1 | 0.3 | 33 | 0.5 | 0.1 |
| Monocytes | 1111 | 100 | ND | ND | 125 | 1429 | ND | ND |
| Immature | 2500 | 100 | ND | ND | 222 | 2857 | ND | ND |
| DC | | | | | | | | |
| Mature DC | 2222 | 100 | ND | ND | 333 | 3333 | ND | ND |

### Lentivirus

[0693] Lentiviruses are complex retroviruses that have the ability to infect and express their genes in both mitotic and post-mitotic cells. The most commonly known lentivirus is the human immunodeficiency virus (HIV), which uses the envelope glycoproteins of other viruses to target a broad range of cell types.

[0694] Lentiviruses may be prepared as follows. After cloning pCasES10 (which contains a lentiviral transfer plasmid backbone), HEK293FT at low passage (p=5) were seeded in a T-75 flask to 50% confluence the day before transfection in DMEM with 10% fetal bovine serum and without antibiotics. After 20 hours, media was changed to OptiMEM (serum-free) media and transfection was done 4 hours later. Cells were transfected with 10 μg of lentiviral transfer plasmid (pCasES10) and the following packaging plasmids: 5 μg of pMD2.G (VSV-g pseudotype), and 7.5 ug of psPAX2 (gag/pol/rev/tat). Transfection was done in 4 mL OptiMEM with a cationic lipid delivery agent (50 uL Lipofectamine 2000 and 100 ul Plus reagent). After 6 hours, the media was changed to antibiotic-free DMEM with 10% fetal bovine serum. These methods use serum during cell culture, but serum-free methods are preferred.

[0695] Lentivirus may be purified as follows. Viral supernatants were harvested after 48 hours. Supernatants were first cleared of debris and filtered through a 0.45 um low protein binding (PVDF) filter. They were then spun in a ultracentrifuge for 2 hours at 24,000 rpm. Viral pellets were resuspended in 50 ul of DMEM overnight at 4 C. They were then aliquotted and immediately frozen at −80° C.

[0696] In another embodiment, minimal non-primate lentiviral vectors based on the equine infectious anemia virus (EIAV) are also contemplated, especially for ocular gene therapy (see, e.g., Balagaan, J Gene Med 2006; 8: 275-285). In another embodiment, RetinoStat®, an equine infectious anemia virus-based lentiviral gene therapy vector that expresses angiostatic proteins endostatin and angiostatin that is delivered via a subretinal injection for the treatment of the web form of age-related macular degeneration is also contemplated (see, e.g., Binley et al., HUMAN GENE THERAPY 23:980-991 (September 2012)) and this vector may be modified for the CRISPR-Cas system of the present invention.

[0697] In another embodiment, self-inactivating lentiviral vectors with an siRNA targeting a common exon shared by HIV tat/rev, a nucleolar-localizing TAR decoy, and an anti-CCR5-specific hammerhead ribozyme (see, e.g., DiGiusto et al. (2010) Sci Transl Med 2:36ra43) may be used/and or adapted to the CRISPR-Cas system of the present invention. A minimum of 2.5×106 CD34+ cells per kilogram patient weight may be collected and prestimulated for 16 to 20 hours in X-VIVO 15 medium (Lonza) containing 2 μmol/L-glutamine, stem cell factor (100 ng/ml), Flt-3 ligand (Flt-3L) (100 ng/ml), and thrombopoietin (10 ng/ml) (CellGenix) at a density of 2×106 cells/ml. Prestimulated cells may be transduced with lentiviral at a multiplicity of infection of 5 for 16 to 24 hours in 75-cm2 tissue culture flasks coated with fibronectin (25 mg/cm2) (RetroNectin, Takara Bio Inc.).

[0698] Lentiviral vectors have been disclosed as in the treatment for Parkinson's Disease, see, e.g., US Patent Publication No. 20120295960 and U.S. Pat. Nos. 7,303,910 and 7,351,585. Lentiviral vectors have also been disclosed for the treatment of ocular diseases, see e.g., US Patent Publication Nos. 20060281180, 20090007284, US20110117189; US20090017543; US20070054961, US20100317109. Lentiviral vectors have also been disclosed for delivery to the brain, see, e.g., US Patent Publication Nos. US20110293571; US20110293571, US20040013648, US20070025970, US20090111106 and U.S. Pat. No. 7,259,015.

### RNA Delivery

[0699] RNA delivery: The CRISPR enzyme, for instance a Cpf1, and/or any of the present RNAs, for instance a guide RNA, can also be delivered in the form of RNA. Cpf1 mRNA can be generated using in vitro transcription. For example, Cpf1 mRNA can be synthesized using a PCR cassette containing the following elements: T7_promoter-kozak sequence (GCCACC)-Cpf1-3′ UTR from beta globin-polyA tail (a string of 120 or more adenines). The cassette can be used for transcription by T7 polymerase. Guide RNAs can also be transcribed using in vitro transcription from a cassette containing T7_promoter-GG-guide RNA sequence.

[0700] To enhance expression and reduce possible toxicity, the CRISPR enzyme-coding sequence and/or the guide RNA can be modified to include one or more modified nucleoside e.g. using pseudo-U or 5-Methyl-C.

[0701] mRNA delivery methods are especially promising for liver delivery currently.

[0702] Much clinical work on RNA delivery has focused on RNAi or antisense, but these systems can be adapted for delivery of RNA for implementing the present invention. References below to RNAi etc. should be read accordingly.

Particle Delivery Systems and/or Formulations:

[0703] Several types of particle delivery systems and/or formulations are known to be useful in a diverse spectrum of biomedical applications. In general, a particle is defined as a small object that behaves as a whole unit with respect to its transport and properties. Particles are further classified according to diameter Coarse particles cover a range between 2,500 and 10,000 nanometers. Fine particles are sized between 100 and 2,500 nanometers. Ultrafine particles, or nanoparticles, are generally between 1 and 100 nanometers in size. The basis of the 100-nm limit is the fact that novel properties that differentiate particles from the bulk material typically develop at a critical length scale of under 100 nm.

[0704] As used herein, a particle delivery system/formulation is defined as any biological delivery system/formulation which includes a particle in accordance with the present invention. A particle in accordance with the present invention is any entity having a greatest dimension (e.g. diameter) of less than 100 microns (μm). In some embodiments, inventive particles have a greatest dimension of less than 10 μm. In some embodiments, inventive particles have a greatest dimension of less than 2000 nanometers (nm). In some embodiments, inventive particles have a greatest dimension of less than 1000 nanometers (nm). In some embodiments, inventive particles have a greatest dimension of less than 900 nm, 800 nm, 700 nm, 600 nm, 500 nm, 400 nm, 300 nm, 200 nm, or 100 nm. Typically, inventive particles have a greatest dimension (e.g., diameter) of 500 nm or less. In some embodiments, inventive particles have a greatest dimension (e.g., diameter) of 250 nm or less. In some embodiments, inventive particles have a greatest dimension (e.g., diameter) of 200 nm or less. In some embodiments, inventive particles have a greatest dimension (e.g., diameter) of 150 nm or less. In some embodiments, inventive particles have a greatest dimension (e.g., diameter) of 100 nm or less. Smaller particles, e.g., having a greatest dimension of 50 nm or less are used in some embodiments of the invention. In some embodiments, inventive particles have a greatest dimension ranging between 25 nm and 200 nm.

[0705] Particle characterization (including e.g., characterizing morphology, dimension, etc.) is done using a variety of different techniques. Common techniques are electron microscopy (TEM, SEM), atomic force microscopy (AFM), dynamic light scattering (DLS), X-ray photoelectron spectroscopy (XPS), powder X-ray diffraction (XRD), Fourier transform infrared spectroscopy (FTIR), matrix-assisted laser desorption/ionization time-of-flight mass spectrometry (MALDI-TOF), ultraviolet-visible spectroscopy, dual polarisation interferometry and nuclear magnetic resonance (NMR). Characterization (dimension measurements) may be made as to native particles (i.e., preloading) or after loading of the cargo (herein cargo refers to e.g., one or more components of CRISPR-Cas system e.g., CRISPR enzyme or mRNA or guide RNA, or any combination thereof, and may include additional carriers and/or excipients) to provide particles of an optimal size for delivery for any in vitro, ex vivo and/or in vivo application of the present invention. In certain preferred embodiments, particle dimension (e.g., diameter) characterization is based on measurements using dynamic laser scattering (DLS). Mention is made of U.S. Pat. No. 8,709,843; U.S. Pat. No. 6,007,845; U.S. Pat. No. 5,855,913; U.S. Pat. No. 5,985,309; U.S. Pat. No. 5,543,158; and the publication by James E. Dahlman and Carmen Barnes et al. Nature Nanotechnology (2014) published online 11 May 2014, doi:10.1038/nnano.2014.84, concerning particles, methods of making and using them and measurements thereof.

[0706] Particles delivery systems within the scope of the present invention may be provided in any form, including but not limited to solid, semi-solid, emulsion, or colloidal particles. As such any of the delivery systems described herein, including but not limited to, e.g., lipid-based systems, liposomes, micelles, microvesicles, exosomes, or gene gun may be provided as particle delivery systems within the scope of the present invention.

### Particles

[0707] It will be appreciated that reference made herein to particles or nanoparticles can be interchangeable, where appropriate. CRISPR enzyme mRNA and guide RNA may be delivered simultaneously using particles or lipid envelopes; for instance, CRISPR enzyme and RNA of the invention, e.g., as a complex, can be delivered via a particle as in Dahlman et al., WO2015089419 A2 and documents cited therein, such as 7C1 (see, e.g., James E. Dahlman and Carmen Barnes et al. Nature Nanotechnology (2014) published online 11 May 2014, doi:10.1038/nnano.2014.84), e.g., delivery particle comprising lipid or lipidoid and hydrophilic polymer, e.g., cationic lipid and hydrophilic polymer, for instance wherein the cationic lipid comprises 1,2-dioleoyl-3-trimethylammonium-propane (DOTAP) or 1,2-ditetradecanoyl-sn-glycero-3-phosphocholine (DMPC) and/or wherein the hydrophilic polymer comprises ethylene glycol or polyethylene glycol (PEG); and/or wherein the particle further comprises cholesterol (e.g., particle from formulation 1=DOTAP 100, DMPC 0, PEG 0, Cholesterol 0; formulation number 2=DOTAP 90, DMPC 0, PEG 10, Cholesterol 0; formulation number 3=DOTAP 90, DMPC 0, PEG 5, Cholesterol 5), wherein particles are formed using an efficient, multistep process wherein first, effector protein and RNA are mixed together, e.g., at a 1:1 molar ratio, e.g., at room temperature, e.g., for 30 minutes, e.g., in sterile, nuclease free 1×PBS; and separately, DOTAP, DMPC, PEG, and cholesterol as applicable for the formulation are dissolved in alcohol, e.g., 100% ethanol; and, the two solutions are mixed together to form particles containing the complexes).

[0708] Nucleic acid-targeting effector proteins (such as a Type V protein such Cpf1) mRNA and guide RNA may be delivered simultaneously using particles or lipid envelopes.

[0709] For example, Su X, Fricke J, Kavanagh D G, Irvine D J (“In vitro and in vivo mRNA delivery using lipid-enveloped pH-responsive polymer nanoparticles” Mol Pharm. 2011 Jun. 6; 8(3): 774-87. doi: 10.1021/mp100390w. Epub 2011 Apr. 1) describes biodegradable core-shell structured nanoparticles with a poly(β-amino ester) (PBAE) core enveloped by a phospholipid bilayer shell. These were developed for in vivo mRNA delivery. The pH-responsive PBAE component was chosen to promote endosome disruption, while the lipid surface layer was selected to minimize toxicity of the polycation core. Such are, therefore, preferred for delivering RNA of the present invention.

[0710] In one embodiment, particles/nanoparticles based on self assembling bioadhesive polymers are contemplated, which may be applied to oral delivery of peptides, intravenous delivery of peptides and nasal delivery of peptides, all to the brain. Other embodiments, such as oral absorption and ocular delivery of hydrophobic drugs are also contemplated. The molecular envelope technology involves an engineered polymer envelope which is protected and delivered to the site of the disease (see, e.g., Mazza, M. et al. ACSNano, 2013. 7(2): 1016-1026; Siew, A., et al. Mol Pharm, 2012. 9(1): 14-28; Lalatsa, A., et al. J Contr Rel, 2012. 161(2): 523-36; Lalatsa, A., et al., Mol Pharm, 2012. 9(6): 1665-80; Lalatsa, A., et al. Mol Pharm, 2012. 9(6): 1764-74; Garrett, N. L., et al. J Biophotonics, 2012. 5(5-6): 458-68; Garrett, N. L., et al. J Raman Spect, 2012. 43(5): 681-688; Ahmad, S., et al. J Royal Soc Interface 2010. 7:S423-33; Uchegbu, I. F. Expert Opin Drug Deliv, 2006. 3(5): 629-40; Qu, X., et al. Biomacromolecules, 2006. 7(12): 3452-9 and Uchegbu, I. F., et al. Int J Pharm, 2001. 224:185-199). Doses of about 5 mg/kg are contemplated, with single or multiple doses, depending on the target tissue.

[0711] In one embodiment, particles/nanoparticles that can deliver RNA to a cancer cell to stop tumor growth developed by Dan Anderson's lab at MIT may be used/and or adapted to the CRISPR Cas system of the present invention. In particular, the Anderson lab developed fully automated, combinatorial systems for the synthesis, purification, characterization, and formulation of new biomaterials and nanoformulations. See, e.g., Alabi et al., Proc Natl Acad Sci USA. 2013 Aug. 6; 110(32): 12881-6; Zhang et al., Adv Mater. 2013 Sep. 6; 25(33): 4641-5; Jiang et al., Nano Lett. 2013 Mar. 13; 13(3): 1059-64; Karagiannis et al., ACS Nano. 2012 Oct. 23; 6(10): 8484-7; Whitehead et al., ACS Nano. 2012 Aug. 28; 6(8): 6922-9 and Lee et al., Nat Nanotechnol. 2012 Jun. 3; 7(6): 389-93.

[0712] US patent application 20110293703 relates to lipidoid compounds are also particularly useful in the administration of polynucleotides, which may be applied to deliver the CRISPR Cas system of the present invention. In one aspect, the aminoalcohol lipidoid compounds are combined with an agent to be delivered to a cell or a subject to form microparticles, nanoparticles, liposomes, or micelles. The agent to be delivered by the particles, liposomes, or micelles may be in the form of a gas, liquid, or solid, and the agent may be a polynucleotide, protein, peptide, or small molecule. The minoalcohol lipidoid compounds may be combined with other aminoalcohol lipidoid compounds, polymers (synthetic or natural), surfactants, cholesterol, carbohydrates, proteins, lipids, etc. to form the particles. These particles may then optionally be combined with a pharmaceutical excipient to form a pharmaceutical composition.

[0713] US Patent Publication No. 20110293703 also provides methods of preparing the aminoalcohol lipidoid compounds. One or more equivalents of an amine are allowed to react with one or more equivalents of an epoxide-terminated compound under suitable conditions to form an aminoalcohol lipidoid compound of the present invention. In certain embodiments, all the amino groups of the amine are fully reacted with the epoxide-terminated compound to form tertiary amines. In other embodiments, all the amino groups of the amine are not fully reacted with the epoxide-terminated compound to form tertiary amines thereby resulting in primary or secondary amines in the aminoalcohol lipidoid compound. These primary or secondary amines are left as is or may be reacted with another electrophile such as a different epoxide-terminated compound. As will be appreciated by one skilled in the art, reacting an amine with less than excess of epoxide-terminated compound will result in a plurality of different aminoalcohol lipidoid compounds with various numbers of tails. Certain amines may be fully functionalized with two epoxide-derived compound tails while other molecules will not be completely functionalized with epoxide-derived compound tails. For example, a diamine or polyamine may include one, two, three, or four epoxide-derived compound tails off the various amino moieties of the molecule resulting in primary, secondary, and tertiary amines. In certain embodiments, all the amino groups are not fully functionalized. In certain embodiments, two of the same types of epoxide-terminated compounds are used. In other embodiments, two or more different epoxide-terminated compounds are used. The synthesis of the aminoalcohol lipidoid compounds is performed with or without solvent, and the synthesis may be performed at higher temperatures ranging from 30-100° C., preferably at approximately 50-90° C. The prepared aminoalcohol lipidoid compounds may be optionally purified. For example, the mixture of aminoalcohol lipidoid compounds may be purified to yield an aminoalcohol lipidoid compound with a particular number of epoxide-derived compound tails. Or the mixture may be purified to yield a particular stereo- or regioisomer. The aminoalcohol lipidoid compounds may also be alkylated using an alkyl halide (e.g., methyl iodide) or other alkylating agent, and/or they may be acylated.

[0714] US Patent Publication No. 20110293703 also provides libraries of aminoalcohol lipidoid compounds prepared by the inventive methods. These aminoalcohol lipidoid compounds may be prepared and/or screened using high-throughput techniques involving liquid handlers, robots, microtiter plates, computers, etc. In certain embodiments, the aminoalcohol lipidoid compounds are screened for their ability to transfect polynucleotides or other agents (e.g., proteins, peptides, small molecules) into the cell.

[0715] US Patent Publication No. 20130302401 relates to a class of poly(beta-amino alcohols) (PBAAs) has been prepared using combinatorial polymerization. The inventive PBAAs may be used in biotechnology and biomedical applications as coatings (such as coatings of films or multilayer films for medical devices or implants), additives, materials, excipients, non-biofouling agents, micropatterning agents, and cellular encapsulation agents. When used as surface coatings, these PBAAs elicited different levels of inflammation, both in vitro and in vivo, depending on their chemical structures. The large chemical diversity of this class of materials allowed us to identify polymer coatings that inhibit macrophage activation in vitro. Furthermore, these coatings reduce the recruitment of inflammatory cells, and reduce fibrosis, following the subcutaneous implantation of carboxylated polystyrene microparticles. These polymers may be used to form polyelectrolyte complex capsules for cell encapsulation. The invention may also have many other biological applications such as antimicrobial coatings, DNA or siRNA delivery, and stem cell tissue engineering. The teachings of US Patent Publication No. 20130302401 may be applied to the CRISPR Cas system of the present invention. In some embodiments, sugar-based particles may be used, for example GalNAc, as described herein and with reference to WO2014118272 (incorporated herein by reference) and Nair, J K et al., 2014, Journal of the American Chemical Society 136 (49), 16958-16961) and the teaching herein, especially in respect of delivery applies to all particles unless otherwise apparent.

[0716] In another embodiment, lipid nanoparticles (LNPs) are contemplated. An antitransthyretin small interfering RNA has been encapsulated in lipid nanoparticles and delivered to humans (see, e.g., Coelho et al., N Engl J Med 2013; 369:819-29), and such a system may be adapted and applied to the CRISPR Cas system of the present invention. Doses of about 0.01 to about 1 mg per kg of body weight administered intravenously are contemplated. Medications to reduce the risk of infusion-related reactions are contemplated, such as dexamethasone, acetampinophen, diphenhydramine or cetirizine, and ranitidine are contemplated. Multiple doses of about 0.3 mg per kilogram every 4 weeks for five doses are also contemplated.

[0717] LNPs have been shown to be highly effective in delivering siRNAs to the liver (see, e.g., Tabernero et al., Cancer Discovery, April 2013, Vol. 3, No. 4, pages 363-470) and are therefore contemplated for delivering RNA encoding CRISPR Cas to the liver. A dosage of about four doses of 6 mg/kg of the LNP every two weeks may be contemplated. Tabernero et al. demonstrated that tumor regression was observed after the first 2 cycles of LNPs dosed at 0.7 mg/kg, and by the end of 6 cycles the patient had achieved a partial response with complete regression of the lymph node metastasis and substantial shrinkage of the liver tumors. A complete response was obtained after 40 doses in this patient, who has remained in remission and completed treatment after receiving doses over 26 months. Two patients with RCC and extrahepatic sites of disease including kidney, lung, and lymph nodes that were progressing following prior therapy with VEGF pathway inhibitors had stable disease at all sites for approximately 8 to 12 months, and a patient with PNET and liver metastases continued on the extension study for 18 months (36 doses) with stable disease.

[0718] However, the charge of the LNP must be taken into consideration. As cationic lipids combined with negatively charged lipids to induce nonbilayer structures that facilitate intracellular delivery. Because charged LNPs are rapidly cleared from circulation following intravenous injection, ionizable cationic lipids with pKa values below 7 were developed (see, e.g., Rosin et al, Molecular Therapy, vol. 19, no. 12, pages 1286-2200, December 2011). Negatively charged polymers such as RNA may be loaded into LNPs at low pH values (e.g., pH 4) where the ionizable lipids display a positive charge. However, at physiological pH values, the LNPs exhibit a low surface charge compatible with longer circulation times. Four species of ionizable cationic lipids have been focused upon, namely 1,2-dilineoyl-3-dimethylammonium-propane (DLinDAP), 1,2-dilinoleyloxy-3-N,N-dimethylaminopropane (DLinDMA), 1,2-dilinoleyloxy-keto-N,N-dimethyl-3-aminopropane (DLinKDMA), and 1,2-dilinoleyl-4-(2-dimethylaminoethyl)-[1,3]-dioxolane (DLinKC2-DMA). It has been shown that LNP siRNA systems containing these lipids exhibit remarkably different gene silencing properties in hepatocytes in vivo, with potencies varying according to the series DLinKC2-DMA>DLinKDMA>DLinDMA>>DLinDAP employing a Factor VII gene silencing model (see, e.g., Rosin et al, Molecular Therapy, vol. 19, no. 12, pages 1286-2200, December 2011). A dosage of 1 μg/ml of LNP or CRISPR-Cas RNA in or associated with the LNP may be contemplated, especially for a formulation containing DLinKC2-DMA.

[0719] Preparation of LNPs and CRISPR Cas encapsulation may be used/and or adapted from Rosin et al, Molecular Therapy, vol. 19, no. 12, pages 1286-2200, December 2011). The cationic lipids 1,2-dilineoyl-3-dimethylammonium-propane (DLinDAP), 1,2-dilinoleyloxy-3-N,N-dimethylaminopropane (DLinDMA), 1,2-dilinoleyloxyketo-N,N-dimethyl-3-aminopropane (DLinK-DMA), 1,2-dilinoleyl-4-(2-dimethylaminoethyl)-[1,3]-dioxolane (DLinKC2-DMA), (3-o-[2″-(methoxypolyethyleneglycol 2000) succinoyl]-1,2-dimyristoyl-sn-glycol (PEG-S-DMG), and R-3-[(ω-methoxy-poly(ethylene glycol)2000) carbamoyl]-1,2-dimyristyloxlpropyl-3-amine (PEG-C-DOMG) may be provided by Tekmira Pharmaceuticals (Vancouver, Canada) or synthesized. Cholesterol may be purchased from Sigma (St Louis, Mo.). The specific CRISPR Cas RNA may be encapsulated in LNPs containing DLinDAP, DLinDMA, DLinK-DMA, and DLinKC2-DMA (cationic lipid:DSPC:CHOL: PEGS-DMG or PEG-C-DOMG at 40:10:40:10 molar ratios). When required, 0.2% SP-DiOC18 (Invitrogen, Burlington, Canada) may be incorporated to assess cellular uptake, intracellular delivery, and biodistribution. Encapsulation may be performed by dissolving lipid mixtures comprised of cationic lipid:DSPC:cholesterol:PEG-c-DOMG (40:10:40:10 molar ratio) in ethanol to a final lipid concentration of 10 mmol/l. This ethanol solution of lipid may be added drop-wise to 50 mmol/l citrate, pH 4.0 to form multilamellar vesicles to produce a final concentration of 30% ethanol vol/vol. Large unilamellar vesicles may be formed following extrusion of multilamellar vesicles through two stacked 80 nm Nuclepore polycarbonate filters using the Extruder (Northern Lipids, Vancouver, Canada). Encapsulation may be achieved by adding RNA dissolved at 2 mg/ml in 50 mmol/l citrate, pH 4.0 containing 30% ethanol vol/vol drop-wise to extruded preformed large unilamellar vesicles and incubation at 31° C. for 30 minutes with constant mixing to a final RNA/lipid weight ratio of 0.06/1 wt/wt. Removal of ethanol and neutralization of formulation buffer were performed by dialysis against phosphate-buffered saline (PBS), pH 7.4 for 16 hours using Spectra/Por 2 regenerated cellulose dialysis membranes. Nanoparticle size distribution may be determined by dynamic light scattering using a NICOMP 370 particle sizer, the vesicle/intensity modes, and Gaussian fitting (Nicomp Particle Sizing, Santa Barbara, Calif.). The particle size for all three LNP systems may be ˜70 nm in diameter. RNA encapsulation efficiency may be determined by removal of free RNA using VivaPureD MiniH columns (Sartorius Stedim Biotech) from samples collected before and after dialysis. The encapsulated RNA may be extracted from the eluted nanoparticles and quantified at 260 nm. RNA to lipid ratio was determined by measurement of cholesterol content in vesicles using the Cholesterol E enzymatic assay from Wako Chemicals USA (Richmond, Va.). In conjunction with the herein discussion of LNPs and PEG lipids, PEGylated liposomes or LNPs are likewise suitable for delivery of a CRISPR-Cas system or components thereof.

[0720] Preparation of large LNPs may be used/and or adapted from Rosin et al, Molecular Therapy, vol. 19, no. 12, pages 1286-2200, December 2011. A lipid premix solution (20.4 mg/ml total lipid concentration) may be prepared in ethanol containing DLinKC2-DMA, DSPC, and cholesterol at 50:10:38.5 molar ratios. Sodium acetate may be added to the lipid premix at a molar ratio of 0.75:1 (sodium acetate:DLinKC2-DMA). The lipids may be subsequently hydrated by combining the mixture with 1.85 volumes of citrate buffer (10 mmol/l, pH 3.0) with vigorous stirring, resulting in spontaneous liposome formation in aqueous buffer containing 35% ethanol. The liposome solution may be incubated at 37° C. to allow for time-dependent increase in particle size. Aliquots may be removed at various times during incubation to investigate changes in liposome size by dynamic light scattering (Zetasizer Nano ZS, Malvern Instruments, Worcestershire, UK). Once the desired particle size is achieved, an aqueous PEG lipid solution (stock=10 mg/ml PEG-DMG in 35% (vol/vol) ethanol) may be added to the liposome mixture to yield a final PEG molar concentration of 3.5% of total lipid. Upon addition of PEG-lipids, the liposomes should their size, effectively quenching further growth. RNA may then be added to the empty liposomes at an RNA to total lipid ratio of approximately 1:10 (wt:wt), followed by incubation for 30 minutes at 37° C. to form loaded LNPs. The mixture may be subsequently dialyzed overnight in PBS and filtered with a 0.45-μm syringe filter.

[0721] Spherical Nucleic Acid (SNA™) constructs and other nanoparticles (particularly gold nanoparticles) are also contemplated as a means to delivery CRISPR-Cas system to intended targets. Significant data show that AuraSense Therapeutics' Spherical Nucleic Acid (SNA™) constructs, based upon nucleic acid-functionalized gold nanoparticles, are useful.

[0722] Literature that may be employed in conjunction with herein teachings include: Cutler et al., J. Am. Chem. Soc. 2011 133:9254-9257, Hao et al., Small. 2011 7:3158-3162, Zhang et al., ACS Nano. 2011 5:6962-6970, Cutler et al., J. Am. Chem. Soc. 2012 134:1376-1391, Young et al., Nano Lett. 2012 12:3867-71, Zheng et al., Proc. Natl. Acad. Sci. USA. 2012 109:11975-80, Mirkin, Nanomedicine 2012 7:635-638 Zhang et al., J. Am. Chem. Soc. 2012 134:16488-1691, Weintraub, Nature 2013 495:S14-S16, Choi et al., Proc. Natl. Acad. Sci. USA. 2013 110(19): 7625-7630, Jensen et al., Sci. Transl. Med. 5, 209ra152 (2013) and Mirkin, et al., Small, 10:186-192.

[0723] Self-assembling nanoparticles with RNA may be constructed with polyethyleneimine (PEI) that is PEGylated with an Arg-Gly-Asp (RGD) peptide ligand attached at the distal end of the polyethylene glycol (PEG). This system has been used, for example, as a means to target tumor neovasculature expressing integrins and deliver siRNA inhibiting vascular endothelial growth factor receptor-2 (VEGF R2) expression and thereby achieve tumor angiogenesis (see, e.g., Schiffelers et al., Nucleic Acids Research, 2004, Vol. 32, No. 19). Nanoplexes may be prepared by mixing equal volumes of aqueous solutions of cationic polymer and nucleic acid to give a net molar excess of ionizable nitrogen (polymer) to phosphate (nucleic acid) over the range of 2 to 6. The electrostatic interactions between cationic polymers and nucleic acid resulted in the formation of polyplexes with average particle size distribution of about 100 nm, hence referred to here as nanoplexes. A dosage of about 100 to 200 mg of CRISPR Cas is envisioned for delivery in the self-assembling nanoparticles of Schiffelers et al.

[0724] The nanoplexes of Bartlett et al. (PNAS, Sep. 25, 2007, vol. 104, no. 39) may also be applied to the present invention. The nanoplexes of Bartlett et al. are prepared by mixing equal volumes of aqueous solutions of cationic polymer and nucleic acid to give a net molar excess of ionizable nitrogen (polymer) to phosphate (nucleic acid) over the range of 2 to 6. The electrostatic interactions between cationic polymers and nucleic acid resulted in the formation of polyplexes with average particle size distribution of about 100 nm, hence referred to here as nanoplexes. The DOTA-siRNA of Bartlett et al. was synthesized as follows: 1,4,7,10-tetraazacyclododecane-1,4,7,10-tetraacetic acid mono(N-hydroxysuccinimide ester) (DOTA-NHSester) was ordered from Macrocyclics (Dallas, Tex.). The amine modified RNA sense strand with a 100-fold molar excess of DOTA-NHS-ester in carbonate buffer (pH 9) was added to a microcentrifuge tube. The contents were reacted by stirring for 4 h at room temperature. The DOTA-RNAsense conjugate was ethanol-precipitated, resuspended in water, and annealed to the unmodified antisense strand to yield DOTA-siRNA. All liquids were pretreated with Chelex-100 (Bio-Rad, Hercules, Calif.) to remove trace metal contaminants. Tf-targeted and nontargeted siRNA nanoparticles may be formed by using cyclodextrin-containing polycations. Typically, nanoparticles were formed in water at a charge ratio of 3 (+/−) and an siRNA concentration of 0.5 g/liter. One percent of the adamantane-PEG molecules on the surface of the targeted nanoparticles were modified with Tf (adamantane-PEG-Tf). The nanoparticles were suspended in a 5% (wt/vol) glucose carrier solution for injection.

[0725] Davis et al. (Nature, Vol 464, 15 Apr. 2010) conducts a RNA clinical trial that uses a targeted nanoparticle-delivery system (clinical trial registration number NCT00689065). Patients with solid cancers refractory to standard-of-care therapies are administered doses of targeted nanoparticles on days 1, 3, 8 and 10 of a 21-day cycle by a 30-min intravenous infusion. The nanoparticles consist of a synthetic delivery system containing: (1) a linear, cyclodextrin-based polymer (CDP), (2) a human transferrin protein (TF) targeting ligand displayed on the exterior of the nanoparticle to engage TF receptors (TFR) on the surface of the cancer cells, (3) a hydrophilic polymer (polyethylene glycol (PEG) used to promote nanoparticle stability in biological fluids), and (4) siRNA designed to reduce the expression of the RRM2 (sequence used in the clinic was previously denoted siR2B+5). The TFR has long been known to be upregulated in malignant cells, and RRM2 is an established anti-cancer target. These nanoparticles (clinical version denoted as CALAA-01) have been shown to be well tolerated in multi-dosing studies in non-human primates. Although a single patient with chronic myeloid leukaemia has been administered siRNA by liposomal delivery, Davis et al.'s clinical trial is the initial human trial to systemically deliver siRNA with a targeted delivery system and to treat patients with solid cancer. To ascertain whether the targeted delivery system can provide effective delivery of functional siRNA to human tumours, Davis et al. investigated biopsies from three patients from three different dosing cohorts; patients A, B and C, all of whom had metastatic melanoma and received CALAA-01 doses of 18, 24 and 30 mg m⁻² siRNA, respectively. Similar doses may also be contemplated for the CRISPR Cas system of the present invention. The delivery of the invention may be achieved with nanoparticles containing a linear, cyclodextrin-based polymer (CDP), a human transferrin protein (TF) targeting ligand displayed on the exterior of the nanoparticle to engage TF receptors (TFR) on the surface of the cancer cells and/or a hydrophilic polymer (for example, polyethylene glycol (PEG) used to promote nanoparticle stability in biological fluids).

[0726] In terms of this invention, it is preferred to have one or more components of CRISPR complex, e.g., CRISPR enzyme or mRNA or guide RNA delivered using nanoparticles or lipid envelopes. Other delivery systems or vectors are may be used in conjunction with the nanoparticle aspects of the invention.

[0727] In general, a “nanoparticle” refers to any particle having a diameter of less than 1000 nm. In certain preferred embodiments, nanoparticles of the invention have a greatest dimension (e.g., diameter) of 500 nm or less. In other preferred embodiments, nanoparticles of the invention have a greatest dimension ranging between 25 nm and 200 nm. In other preferred embodiments, nanoparticles of the invention have a greatest dimension of 100 nm or less. In other preferred embodiments, nanoparticles of the invention have a greatest dimension ranging between 35 nm and 60 nm.

[0728] Nanoparticles encompassed in the present invention may be provided in different forms, e.g., as solid nanoparticles (e.g., metal such as silver, gold, iron, titanium), non-metal, lipid-based solids, polymers), suspensions of nanoparticles, or combinations thereof. Metal, dielectric, and semiconductor nanoparticles may be prepared, as well as hybrid structures (e.g., core-shell nanoparticles). Nanoparticles made of semiconducting material may also be labeled quantum dots if they are small enough (typically sub 10 nm) that quantization of electronic energy levels occurs. Such nanoscale particles are used in biomedical applications as drug carriers or imaging agents and may be adapted for similar purposes in the present invention.

[0729] Semi-solid and soft nanoparticles have been manufactured, and are within the scope of the present invention. A prototype nanoparticle of semi-solid nature is the liposome. Various types of liposome nanoparticles are currently used clinically as delivery systems for anticancer drugs and vaccines. Nanoparticles with one half hydrophilic and the other half hydrophobic are termed Janus particles and are particularly effective for stabilizing emulsions. They can self-assemble at water/oil interfaces and act as solid surfactants.

[0730] U.S. Pat. No. 8,709,843, incorporated herein by reference, provides a drug delivery system for targeted delivery of therapeutic agent-containing particles to tissues, cells, and intracellular compartments. The invention provides targeted particles comprising polymer conjugated to a surfactant, hydrophilic polymer or lipid.

[0731] U.S. Pat. No. 6,007,845, incorporated herein by reference, provides particles which have a core of a multiblock copolymer formed by covalently linking a multifunctional compound with one or more hydrophobic polymers and one or more hydrophilic polymers, and contain a biologically active material.

[0732] U.S. Pat. No. 5,855,913, incorporated herein by reference, provides a particulate composition having aerodynamically light particles having a tap density of less than 0.4 g/cm3 with a mean diameter of between 5 μm and 30 μm, incorporating a surfactant on the surface thereof for drug delivery to the pulmonary system.

[0733] U.S. Pat. No. 5,985,309, incorporated herein by reference, provides particles incorporating a surfactant and/or a hydrophilic or hydrophobic complex of a positively or negatively charged therapeutic or diagnostic agent and a charged molecule of opposite charge for delivery to the pulmonary system.

[0734] U.S. Pat. No. 5,543,158, incorporated herein by reference, provides biodegradable injectable particles having a biodegradable solid core containing a biologically active material and poly(alkylene glycol) moieties on the surface.

[0735] WO2012135025 (also published as US20120251560), incorporated herein by reference, describes conjugated polyethyleneimine (PEI) polymers and conjugated aza-macrocycles (collectively referred to as “conjugated lipomer” or “lipomers”). In certain embodiments, it can envisioned that such conjugated lipomers can be used in the context of the CRISPR-Cas system to achieve in vitro, ex vivo and in vivo genomic perturbations to modify gene expression, including modulation of protein expression.

[0736] In one embodiment, the nanoparticle may be epoxide-modified lipid-polymer, advantageously 7C1 (see, e.g., James E. Dahlman and Carmen Barnes et al. Nature Nanotechnology (2014) published online 11 May 2014, doi:10.1038/nnano.2014.84). C71 was synthesized by reacting C15 epoxide-terminated lipids with PEI600 at a 14:1 molar ratio, and was formulated with C14PEG2000 to produce nanoparticles (diameter between 35 and 60 nm) that were stable in PBS solution for at least 40 days.

[0737] An epoxide-modified lipid-polymer may be utilized to deliver the CRISPR-Cas system of the present invention to pulmonary, cardiovascular or renal cells, however, one of skill in the art may adapt the system to deliver to other target organs. Dosage ranging from about 0.05 to about 0.6 mg/kg are envisioned. Dosages over several days or weeks are also envisioned, with a total dosage of about 2 mg/kg.

### Exosomes

[0738] Exosomes are endogenous nano-vesicles that transport RNAs and proteins, and which can deliver RNA to the brain and other target organs. To reduce immunogenicity, Alvarez-Erviti et al. (2011, Nat Biotechnol 29: 341) used self-derived dendritic cells for exosome production. Targeting to the brain was achieved by engineering the dendritic cells to express Lamp2b, an exosomal membrane protein, fused to the neuron-specific RVG peptide. Purified exosomes were loaded with exogenous RNA by electroporation. Intravenously injected RVG-targeted exosomes delivered GAPDH siRNA specifically to neurons, microglia, oligodendrocytes in the brain, resulting in a specific gene knockdown. Pre-exposure to RVG exosomes did not attenuate knockdown, and non-specific uptake in other tissues was not observed. The therapeutic potential of exosome-mediated siRNA delivery was demonstrated by the strong mRNA (60%) and protein (62%) knockdown of BACE1, a therapeutic target in Alzheimer's disease.

[0739] To obtain a pool of immunologically inert exosomes, Alvarez-Erviti et al. harvested bone marrow from inbred C57BL/6 mice with a homogenous major histocompatibility complex (MHC) haplotype. As immature dendritic cells produce large quantities of exosomes devoid of T-cell activators such as MHC-II and CD86, Alvarez-Erviti et al. selected for dendritic cells with granulocyte/macrophage-colony stimulating factor (GM-CSF) for 7 d. Exosomes were purified from the culture supernatant the following day using well-established ultracentrifugation protocols. The exosomes produced were physically homogenous, with a size distribution peaking at 80 nm in diameter as determined by nanoparticle tracking analysis (NTA) and electron microscopy. Alvarez-Erviti et al. obtained 6-12 μg of exosomes (measured based on protein concentration) per 10⁶ cells.

[0740] Next, Alvarez-Erviti et al. investigated the possibility of loading modified exosomes with exogenous cargoes using electroporation protocols adapted for nanoscale applications. As electroporation for membrane particles at the nanometer scale is not well-characterized, nonspecific Cy5-labeled RNA was used for the empirical optimization of the electroporation protocol. The amount of encapsulated RNA was assayed after ultracentrifugation and lysis of exosomes. Electroporation at 400 V and 125 μF resulted in the greatest retention of RNA and was used for all subsequent experiments.

[0741] Alvarez-Erviti et al. administered 150 μg of each BACE1 siRNA encapsulated in 150 μg of RVG exosomes to normal C57BL/6 mice and compared the knockdown efficiency to four controls: untreated mice, mice injected with RVG exosomes only, mice injected with BACE1 siRNA complexed to an in vivo cationic liposome reagent and mice injected with BACE1 siRNA complexed to RVG-9R, the RVG peptide conjugated to 9 D-arginines that electrostatically binds to the siRNA. Cortical tissue samples were analyzed 3 d after administration and a significant protein knockdown (45%, P<0.05, versus 62%, P<0.01) in both siRNA-RVG-9R-treated and siRNARVG exosome-treated mice was observed, resulting from a significant decrease in BACE1 mRNA levels (66% [+ or −] 15%, P<0.001 and 61% [+ or −] 13% respectively, P<0.01). Moreover, Applicants demonstrated a significant decrease (55%, P<0.05) in the total [beta]-amyloid 1-42 levels, a main component of the amyloid plaques in Alzheimer's pathology, in the RVG-exosome-treated animals. The decrease observed was greater than the β-amyloid 1-40 decrease demonstrated in normal mice after intraventricular injection of BACE1 inhibitors. Alvarez-Erviti et al. carried out 5′-rapid amplification of cDNA ends (RACE) on BACE1 cleavage product, which provided evidence of RNAi-mediated knockdown by the siRNA.

[0742] Finally, Alvarez-Erviti et al. investigated whether RNA-RVG exosomes induced immune responses in vivo by assessing IL-6, IP-10, TNFα and IFN-α serum concentrations. Following exosome treatment, nonsignificant changes in all cytokines were registered similar to siRNA-transfection reagent treatment in contrast to siRNA-RVG-9R, which potently stimulated IL-6 secretion, confirming the immunologically inert profile of the exosome treatment. Given that exosomes encapsulate only 20% of siRNA, delivery with RVG-exosome appears to be more efficient than RVG-9R delivery as comparable mRNA knockdown and greater protein knockdown was achieved with fivefold less siRNA without the corresponding level of immune stimulation. This experiment demonstrated the therapeutic potential of RVG-exosome technology, which is potentially suited for long-term silencing of genes related to neurodegenerative diseases. The exosome delivery system of Alvarez-Erviti et al. may be applied to deliver the CRISPR-Cas system of the present invention to therapeutic targets, especially neurodegenerative diseases. A dosage of about 100 to 1000 mg of CRISPR Cas encapsulated in about 100 to 1000 mg of RVG exosomes may be contemplated for the present invention.

[0743] El-Andaloussi et al. (Nature Protocols 7, 2112-2126 (2012)) discloses how exosomes derived from cultured cells can be harnessed for delivery of RNA in vitro and in vivo. This protocol first describes the generation of targeted exosomes through transfection of an expression vector, comprising an exosomal protein fused with a peptide ligand. Next, El-Andaloussi et al. explain how to purify and characterize exosomes from transfected cell supernatant. Next, El-Andaloussi et al. detail crucial steps for loading RNA into exosomes. Finally, El-Andaloussi et al. outline how to use exosomes to efficiently deliver RNA in vitro and in vivo in mouse brain. Examples of anticipated results in which exosome-mediated RNA delivery is evaluated by functional assays and imaging are also provided. The entire protocol takes ˜3 weeks. Delivery or administration according to the invention may be performed using exosomes produced from self-derived dendritic cells. From the herein teachings, this can be employed in the practice of the invention.

[0744] In another embodiment, the plasma exosomes of Wahlgren et al. (Nucleic Acids Research, 2012, Vol. 40, No. 17 e130) are contemplated. Exosomes are nano-sized vesicles (30-90 nm in size) produced by many cell types, including dendritic cells (DC), B cells, T cells, mast cells, epithelial cells and tumor cells. These vesicles are formed by inward budding of late endosomes and are then released to the extracellular environment upon fusion with the plasma membrane. Because exosomes naturally carry RNA between cells, this property may be useful in gene therapy, and from this disclosure can be employed in the practice of the instant invention.

[0745] Exosomes from plasma can be prepared by centrifugation of buffy coat at 900 g for 20 min to isolate the plasma followed by harvesting cell supernatants, centrifuging at 300 g for 10 min to eliminate cells and at 16 500 g for 30 min followed by filtration through a 0.22 mm filter. Exosomes are pelleted by ultracentrifugation at 120 000 g for 70 min. Chemical transfection of siRNA into exosomes is carried out according to the manufacturer's instructions in RNAi Human/Mouse Starter Kit (Quiagen, Hilden, Germany). siRNA is added to 100 ml PBS at a final concentration of 2 mmol/ml. After adding HiPerFect transfection reagent, the mixture is incubated for 10 min at RT. In order to remove the excess of micelles, the exosomes are re-isolated using aldehyde/sulfate latex beads. The chemical transfection of CRISPR Cas into exosomes may be conducted similarly to siRNA. The exosomes may be co-cultured with monocytes and lymphocytes isolated from the peripheral blood of healthy donors. Therefore, it may be contemplated that exosomes containing CRISPR Cas may be introduced to monocytes and lymphocytes of and autologously reintroduced into a human. Accordingly, delivery or administration according to the invention may be performed using plasma exosomes.

### Liposomes

[0746] Delivery or administration according to the invention can be performed with liposomes. Liposomes are spherical vesicle structures composed of a uni- or multilamellar lipid bilayer surrounding internal aqueous compartments and a relatively impermeable outer lipophilic phospholipid bilayer. Liposomes have gained considerable attention as drug delivery carriers because they are biocompatible, nontoxic, can deliver both hydrophilic and lipophilic drug molecules, protect their cargo from degradation by plasma enzymes, and transport their load across biological membranes and the blood brain barrier (BBB) (see, e.g., Spuch and Navarro, Journal of Drug Delivery, vol. 2011, Article ID 469679, 12 pages, 2011. doi:10.1155/2011/469679 for review).

[0747] Liposomes can be made from several different types of lipids; however, phospholipids are most commonly used to generate liposomes as drug carriers. Although liposome formation is spontaneous when a lipid film is mixed with an aqueous solution, it can also be expedited by applying force in the form of shaking by using a homogenizer, sonicator, or an extrusion apparatus (see, e.g., Spuch and Navarro, Journal of Drug Delivery, vol. 2011, Article ID 469679, 12 pages, 2011. doi:10.1155/2011/469679 for review).

[0748] Several other additives may be added to liposomes in order to modify their structure and properties. For instance, either cholesterol or sphingomyelin may be added to the liposomal mixture in order to help stabilize the liposomal structure and to prevent the leakage of the liposomal inner cargo. Further, liposomes are prepared from hydrogenated egg phosphatidylcholine or egg phosphatidylcholine, cholesterol, and dicetyl phosphate, and their mean vesicle sizes were adjusted to about 50 and 100 nm. (see, e.g., Spuch and Navarro, Journal of Drug Delivery, vol. 2011, Article ID 469679, 12 pages, 2011. doi:10.1155/2011/469679 for review).

[0749] A liposome formulation may be mainly comprised of natural phospholipids and lipids such as 1,2-distearoryl-sn-glycero-3-phosphatidyl choline (DSPC), sphingomyelin, egg phosphatidylcholines and monosialoganglioside. Since this formulation is made up of phospholipids only, liposomal formulations have encountered many challenges, one of the ones being the instability in plasma. Several attempts to overcome these challenges have been made, specifically in the manipulation of the lipid membrane. One of these attempts focused on the manipulation of cholesterol. Addition of cholesterol to conventional formulations reduces rapid release of the encapsulated bioactive compound into the plasma or 1,2-dioleoyl-sn-glycero-3-phosphoethanolamine (DOPE) increases the stability (see, e.g., Spuch and Navarro, Journal of Drug Delivery, vol. 2011, Article ID 469679, 12 pages, 2011. doi:10.1155/2011/469679 for review).

[0750] In a particularly advantageous embodiment, Trojan Horse liposomes (also known as Molecular Trojan Horses) are desirable and protocols may be found at http://cshprotocols.cshlp.org/content/2010/4/pdb.prot5407.long. These particles allow delivery of a transgene to the entire brain after an intravascular injection. Without being bound by limitation, it is believed that neutral lipid particles with specific antibodies conjugated to surface allow crossing of the blood brain barrier via endocytosis. Applicant postulates utilizing Trojan Horse Liposomes to deliver the CRISPR family of nucleases to the brain via an intravascular injection, which would allow whole brain transgenic animals without the need for embryonic manipulation. About 1-5 g of DNA or RNA may be contemplated for in vivo administration in liposomes.

[0751] In another embodiment, the CRISPR Cas system or components thereof may be administered in liposomes, such as a stable nucleic-acid-lipid particle (SNALP) (see, e.g., Morrissey et al., Nature Biotechnology, Vol. 23, No. 8, August 2005). Daily intravenous injections of about 1, 3 or 5 mg/kg/day of a specific CRISPR Cas targeted in a SNALP are contemplated. The daily treatment may be over about three days and then weekly for about five weeks. In another embodiment, a specific CRISPR Cas encapsulated SNALP) administered by intravenous injection to at doses of about 1 or 2.5 mg/kg are also contemplated (see, e.g., Zimmerman et al., Nature Letters, Vol. 441, 4 May 2006). The SNALP formulation may contain the lipids 3-N-[(methoxypoly(ethylene glycol) 2000) carbamoyl]-1,2-dimyristyloxy-propylamine (PEG-C-DMA), 1,2-dilinoleyloxy-N,N-dimethyl-3-aminopropane (DLinDMA), 1,2-distearoyl-sn-glycero-3-phosphocholine (DSPC) and cholesterol, in a 2:40:10:48 molar percent ratio (see, e.g., Zimmerman et al., Nature Letters, Vol. 441, 4 May 2006).

[0752] In another embodiment, stable nucleic-acid-lipid particles (SNALPs) have proven to be effective delivery molecules to highly vascularized HepG2-derived liver tumors but not in poorly vascularized HCT-116 derived liver tumors (see, e.g., Li, Gene Therapy (2012) 19, 775-780). The SNALP liposomes may be prepared by formulating D-Lin-DMA and PEG-C-DMA with distearoylphosphatidylcholine (DSPC), Cholesterol and siRNA using a 25:1 lipid/siRNA ratio and a 48/40/10/2 molar ratio of Cholesterol/D-Lin-DMA/DSPC/PEG-C-DMA. The resulted SNALP liposomes are about 80-100 nm in size.

[0753] In yet another embodiment, a SNALP may comprise synthetic cholesterol (Sigma-Aldrich, St Louis, Mo., USA), dipalmitoylphosphatidylcholine (Avanti Polar Lipids, Alabaster, Ala., USA), 3-N-[(w-methoxy poly(ethylene glycol)2000)carbamoyl]-1,2-dimyrestyloxypropylamine, and cationic 1,2-dilinoleyloxy-3-N,Ndimethylaminopropane (see, e.g., Geisbert et al., Lancet 2010; 375: 1896-905). A dosage of about 2 mg/kg total CRISPR Cas per dose administered as, for example, a bolus intravenous infusion may be contemplated.

[0754] In yet another embodiment, a SNALP may comprise synthetic cholesterol (Sigma-Aldrich), 1,2-distearoyl-sn-glycero-3-phosphocholine (DSPC; Avanti Polar Lipids Inc.), PEG-cDMA, and 1,2-dilinoleyloxy-3-(N;N-dimethyl)aminopropane (DLinDMA) (see, e.g., Judge, J. Clin. Invest. 119:661-673 (2009)). Formulations used for in vivo studies may comprise a final lipid/RNA mass ratio of about 9:1.

[0755] The safety profile of RNAi nanomedicines has been reviewed by Barros and Gollob of Alnylam Pharmaceuticals (see, e.g., Advanced Drug Delivery Reviews 64 (2012) 1730-1737). The stable nucleic acid lipid particle (SNALP) is comprised of four different lipids—an ionizable lipid (DLinDMA) that is cationic at low pH, a neutral helper lipid, cholesterol, and a diffusible polyethylene glycol (PEG)-lipid. The particle is approximately 80 nm in diameter and is charge-neutral at physiologic pH. During formulation, the ionizable lipid serves to condense lipid with the anionic RNA during particle formation. When positively charged under increasingly acidic endosomal conditions, the ionizable lipid also mediates the fusion of SNALP with the endosomal membrane enabling release of RNA into the cytoplasm. The PEG-lipid stabilizes the particle and reduces aggregation during formulation, and subsequently provides a neutral hydrophilic exterior that improves pharmacokinetic properties.

[0756] To date, two clinical programs have been initiated using SNALP formulations with RNA. Tekmira Pharmaceuticals recently completed a phase I single-dose study of SNALP-ApoB in adult volunteers with elevated LDL cholesterol. ApoB is predominantly expressed in the liver and jejunum and is essential for the assembly and secretion of VLDL and LDL. Seventeen subjects received a single dose of SNALP-ApoB (dose escalation across 7 dose levels). There was no evidence of liver toxicity (anticipated as the potential dose-limiting toxicity based on preclinical studies). One (of two) subjects at the highest dose experienced flu-like symptoms consistent with immune system stimulation, and the decision was made to conclude the trial.

[0757] Alnylam Pharmaceuticals has similarly advanced ALN-TTR01, which employs the SNALP technology described above and targets hepatocyte production of both mutant and wild-type TTR to treat TTR amyloidosis (ATTR). Three ATTR syndromes have been described: familial amyloidotic polyneuropathy (FAP) and familial amyloidotic cardiomyopathy (FAC)—both caused by autosomal dominant mutations in TTR; and senile systemic amyloidosis (SSA) cause by wildtype TTR. A placebo-controlled, single dose-escalation phase I trial of ALN-TTR01 was recently completed in patients with ATTR. ALN-TTR01 was administered as a 15-minute IV infusion to 31 patients (23 with study drug and 8 with placebo) within a dose range of 0.01 to 1.0 mg/kg (based on siRNA). Treatment was well tolerated with no significant increases in liver function tests. Infusion-related reactions were noted in 3 of 23 patients at ≧0.4 mg/kg; all responded to slowing of the infusion rate and all continued on study. Minimal and transient elevations of serum cytokines IL-6, IP-10 and IL-1ra were noted in two patients at the highest dose of 1 mg/kg (as anticipated from preclinical and NHP studies). Lowering of serum TTR, the expected pharmacodynamics effect of ALN-TTR01, was observed at 1 mg/kg.

[0758] In yet another embodiment, a SNALP may be made by solubilizing a cationic lipid, DSPC, cholesterol and PEG-lipid e.g., in ethanol, e.g., at a molar ratio of 40:10:40:10, respectively (see, Semple et al., Nature Niotechnology, Volume 28 Number 2 Feb. 2010, pp. 172-177). The lipid mixture was added to an aqueous buffer (50 mM citrate, pH 4) with mixing to a final ethanol and lipid concentration of 30% (vol/vol) and 6.1 mg/ml, respectively, and allowed to equilibrate at 22° C. for 2 min before extrusion. The hydrated lipids were extruded through two stacked 80 nm pore-sized filters (Nuclepore) at 22° C. using a Lipex Extruder (Northern Lipids) until a vesicle diameter of 70-90 nm, as determined by dynamic light scattering analysis, was obtained. This generally required 1-3 passes. The siRNA (solubilized in a 50 mM citrate, pH 4 aqueous solution containing 30% ethanol) was added to the pre-equilibrated (35° C.) vesicles at a rate of ˜5 ml/min with mixing. After a final target siRNA/lipid ratio of 0.06 (wt/wt) was reached, the mixture was incubated for a further 30 min at 35° C. to allow vesicle reorganization and encapsulation of the siRNA. The ethanol was then removed and the external buffer replaced with PBS (155 mM NaCl, 3 mM Na₂HPO₄, 1 mM KH₂PO₄, pH 7.5) by either dialysis or tangential flow diafiltration. siRNA were encapsulated in SNALP using a controlled step-wise dilution method process. The lipid constituents of KC2-SNALP were DLin-KC2-DMA (cationic lipid), dipalmitoylphosphatidylcholine (DPPC; Avanti Polar Lipids), synthetic cholesterol (Sigma) and PEG-C-DMA used at a molar ratio of 57.1:7.1:34.3:1.4. Upon formation of the loaded particles, SNALP were dialyzed against PBS and filter sterilized through a 0.2 μm filter before use. Mean particle sizes were 75-85 nm and 90-95% of the siRNA was encapsulated within the lipid particles. The final siRNA/lipid ratio in formulations used for in vivo testing was ˜0.15 (wt/wt). LNP-siRNA systems containing Factor VII siRNA were diluted to the appropriate concentrations in sterile PBS immediately before use and the formulations were administered intravenously through the lateral tail vein in a total volume of 10 ml/kg. This method and these delivery systems may be extrapolated to the CRISPR Cas system of the present invention.

### Other Lipids

[0759] Other cationic lipids, such as amino lipid 2,2-dilinoleyl-4-dimethylaminoethyl-[1,3]-dioxolane (DLin-KC2-DMA) may be utilized to encapsulate CRISPR Cas or components thereof or nucleic acid molecule(s) coding therefor e.g., similar to SiRNA (see, e.g., Jayaraman, Angew. Chem. Int. Ed. 2012, 51, 8529-8533), and hence may be employed in the practice of the invention. A preformed vesicle with the following lipid composition may be contemplated: amino lipid, distearoylphosphatidylcholine (DSPC), cholesterol and (R)-2,3-bis(octadecyloxy) propyl-1-(methoxy poly(ethylene glycol)2000)propylcarbamate (PEG-lipid) in the molar ratio 40/10/40/10, respectively, and a FVII siRNA/total lipid ratio of approximately 0.05 (w/w). To ensure a narrow particle size distribution in the range of 70-90 nm and a low polydispersity index of 0.11±0.04 (n=56), the particles may be extruded up to three times through 80 nm membranes prior to adding the guide RNA. Particles containing the highly potent amino lipid 16 may be used, in which the molar ratio of the four lipid components 16, DSPC, cholesterol and PEG-lipid (50/10/38.5/1.5) which may be further optimized to enhance in vivo activity.

[0760] Michael S D Kormann et al. (“Expression of therapeutic proteins after delivery of chemically modified mRNA in mice: Nature Biotechnology, Volume: 29, Pages: 154-157 (2011)) describes the use of lipid envelopes to deliver RNA. Use of lipid envelopes is also preferred in the present invention.

[0761] In another embodiment, lipids may be formulated with the CRISPR Cas system of the present invention or component(s) thereof or nucleic acid molecule(s) coding therefor to form lipid nanoparticles (LNPs). Lipids include, but are not limited to, DLin-KC2-DMA4, C12-200 and colipids disteroylphosphatidyl choline, cholesterol, and PEG-DMG may be formulated with CRISPR Cas instead of siRNA (see, e.g., Novobrantseva, Molecular Therapy—Nucleic Acids (2012) 1, e4; doi:10.1038/mtna.2011.3) using a spontaneous vesicle formation procedure. The component molar ratio may be about 50/10/38.5/1.5 (DLin-KC2-DMA or C12-200/disteroylphosphatidyl choline/cholesterol/PEG-DMG). The final lipid:siRNA weight ratio may be ˜12:1 and 9:1 in the case of DLin-KC2-DMA and C12-200 lipid nanoparticles (LNPs), respectively. The formulations may have mean particle diameters of ˜80 nm with >90% entrapment efficiency. A 3 mg/kg dose may be contemplated.

[0762] Tekmira has a portfolio of approximately 95 patent families, in the U.S. and abroad, that are directed to various aspects of LNPs and LNP formulations (see, e.g., U.S. Pat. Nos. 7,982,027; 7,799,565; 8,058,069; 8,283,333; 7,901,708; 7,745,651; 7,803,397; 8,101,741; 8,188,263; 7,915,399; 8,236,943 and 7,838,658 and European Pat. Nos 1766035; 1519714; 1781593 and 1664316), all of which may be used and/or adapted to the present invention.

[0763] The CRISPR Cas system or components thereof or nucleic acid molecule(s) coding therefor may be delivered encapsulated in PLGA Microspheres such as that further described in US published applications 20130252281 and 20130245107 and 20130244279 (assigned to Moderna Therapeutics) which relate to aspects of formulation of compositions comprising modified nucleic acid molecules which may encode a protein, a protein precursor, or a partially or fully processed form of the protein or a protein precursor. The formulation may have a molar ratio 50:10:38.5:1.5-3.0 (cationic lipid:fusogenic lipid:cholesterol:PEG lipid). The PEG lipid may be selected from, but is not limited to PEG-c-DOMG, PEG-DMG. The fusogenic lipid may be DSPC. See also, Schrum et al., Delivery and Formulation of Engineered Nucleic Acids, US published application 20120251618.

[0764] Nanomerics' technology addresses bioavailability challenges for a broad range of therapeutics, including low molecular weight hydrophobic drugs, peptides, and nucleic acid based therapeutics (plasmid, siRNA, miRNA). Specific administration routes for which the technology has demonstrated clear advantages include the oral route, transport across the blood-brain-barrier, delivery to solid tumours, as well as to the eye. See, e.g., Mazza et al., 2013, ACS Nano. 2013 Feb. 26; 7(2): 1016-26; Uchegbu and Siew, 2013, J Pharm Sci. 102(2):305-10 and Lalatsa et al., 2012, J Control Release. 2012 Jul. 20; 161(2): 523-36.

[0765] US Patent Publication No. 20050019923 describes cationic dendrimers for delivering bioactive molecules, such as polynucleotide molecules, peptides and polypeptides and/or pharmaceutical agents, to a mammalian body. The dendrimers are suitable for targeting the delivery of the bioactive molecules to, for example, the liver, spleen, lung, kidney or heart (or even the brain). Dendrimers are synthetic 3-dimensional macromolecules that are prepared in a step-wise fashion from simple branched monomer units, the nature and functionality of which can be easily controlled and varied. Dendrimers are synthesised from the repeated addition of building blocks to a multifunctional core (divergent approach to synthesis), or towards a multifunctional core (convergent approach to synthesis) and each addition of a 3-dimensional shell of building blocks leads to the formation of a higher generation of the dendrimers. Polypropylenimine dendrimers start from a diaminobutane core to which is added twice the number of amino groups by a double Michael addition of acrylonitrile to the primary amines followed by the hydrogenation of the nitriles. This results in a doubling of the amino groups. Polypropylenimine dendrimers contain 100% protonable nitrogens and up to 64 terminal amino groups (generation 5, DAB 64). Protonable groups are usually amine groups which are able to accept protons at neutral pH. The use of dendrimers as gene delivery agents has largely focused on the use of the polyamidoamine. and phosphorous containing compounds with a mixture of amine/amide or N—P(O₂)S as the conjugating units respectively with no work being reported on the use of the lower generation polypropylenimine dendrimers for gene delivery. Polypropylenimine dendrimers have also been studied as pH sensitive controlled release systems for drug delivery and for their encapsulation of guest molecules when chemically modified by peripheral amino acid groups. The cytotoxicity and interaction of polypropylenimine dendrimers with DNA as well as the transfection efficacy of DAB 64 has also been studied.

[0766] US Patent Publication No. 20050019923 is based upon the observation that, contrary to earlier reports, cationic dendrimers, such as polypropylenimine dendrimers, display suitable properties, such as specific targeting and low toxicity, for use in the targeted delivery of bioactive molecules, such as genetic material. In addition, derivatives of the cationic dendrimer also display suitable properties for the targeted delivery of bioactive molecules. See also, Bioactive Polymers, US published application 20080267903, which discloses “Various polymers, including cationic polyamine polymers and dendrimeric polymers, are shown to possess anti-proliferative activity, and may therefore be useful for treatment of disorders characterised by undesirable cellular proliferation such as neoplasms and tumours, inflammatory disorders (including autoimmune disorders), psoriasis and atherosclerosis. The polymers may be used alone as active agents, or as delivery vehicles for other therapeutic agents, such as drug molecules or nucleic acids for gene therapy. In such cases, the polymers' own intrinsic anti-tumour activity may complement the activity of the agent to be delivered.” The disclosures of these patent publications may be employed in conjunction with herein teachings for delivery of CRISPR Cas system(s) or component(s) thereof or nucleic acid molecule(s) coding therefor.

### Supercharged Proteins

[0767] Supercharged proteins are a class of engineered or naturally occurring proteins with unusually high positive or negative net theoretical charge and may be employed in delivery of CRISPR Cas system(s) or component(s) thereof or nucleic acid molecule(s) coding therefor. Both supernegatively and superpositively charged proteins exhibit a remarkable ability to withstand thermally or chemically induced aggregation. Superpositively charged proteins are also able to penetrate mammalian cells. Associating cargo with these proteins, such as plasmid DNA, RNA, or other proteins, can enable the functional delivery of these macromolecules into mammalian cells both in vitro and in vivo. David Liu's lab reported the creation and characterization of supercharged proteins in 2007 (Lawrence et al., 2007, Journal of the American Chemical Society 129, 10110-10112).

[0768] The nonviral delivery of RNA and plasmid DNA into mammalian cells are valuable both for research and therapeutic applications (Akinc et al., 2010, Nat. Biotech. 26, 561-569). Purified +36 GFP protein (or other superpositively charged protein) is mixed with RNAs in the appropriate serum-free media and allowed to complex prior addition to cells. Inclusion of serum at this stage inhibits formation of the supercharged protein-RNA complexes and reduces the effectiveness of the treatment. The following protocol has been found to be effective for a variety of cell lines (McNaughton et al., 2009, Proc. Natl. Acad. Sci. USA 106, 6111-6116) (However, pilot experiments varying the dose of protein and RNA should be performed to optimize the procedure for specific cell lines):
[0769] (1) One day before treatment, plate 1×10⁵ cells per well in a 48-well plate.
[0770] (2) On the day of treatment, dilute purified +36 GFP protein in serumfree media to a final concentration 200 nM. Add RNA to a final concentration of 50 nM. Vortex to mix and incubate at room temperature for 10 min.
[0771] (3) During incubation, aspirate media from cells and wash once with PBS.
[0772] (4) Following incubation of +36 GFP and RNA, add the protein-RNA complexes to cells.
[0773] (5) Incubate cells with complexes at 37° C. for 4 h.
[0774] (6) Following incubation, aspirate the media and wash three times with 20 U/mL heparin PBS. Incubate cells with serum-containing media for a further 48 h or longer depending upon the assay for activity.
[0775] (7) Analyze cells by immunoblot, qPCR, phenotypic assay, or other appropriate method.

[0776] David Liu's lab has further found +36 GFP to be an effective plasmid delivery reagent in a range of cells. As plasmid DNA is a larger cargo than siRNA, proportionately more +36 GFP protein is required to effectively complex plasmids. For effective plasmid delivery Applicants have developed a variant of +36 GFP bearing a C-terminal HA2 peptide tag, a known endosome-disrupting peptide derived from the influenza virus hemagglutinin protein. The following protocol has been effective in a variety of cells, but as above it is advised that plasmid DNA and supercharged protein doses be optimized for specific cell lines and delivery applications:
[0777] (1) One day before treatment, plate 1×10⁵ per well in a 48-well plate. (2) On the day of treatment, dilute purified [symbol] 36 GFP protein in serum free media to a final concentration 2 mM. Add 1 mg of plasmid DNA. Vortex to mix and incubate at room temperature for 10 min.
[0778] (3) During incubation, aspirate media from cells and wash once with PBS.
[0779] (4) Following incubation of [symbol] 36 GFP and plasmid DNA, gently add the protein-DNA complexes to cells.
[0780] (5) Incubate cells with complexes at 37 C for 4 h.
[0781] (6) Following incubation, aspirate the media and wash with PBS. Incubate cells in serum-containing media and incubate for a further 24-48 h.
[0782] (7) Analyze plasmid delivery (e.g., by plasmid-driven gene expression) as appropriate.

[0783] See also, e.g., McNaughton et al., Proc. Natl. Acad. Sci. USA 106, 6111-6116 (2009); Cronican et al., ACS Chemical Biology 5, 747-752 (2010); Cronican et al., Chemistry & Biology 18, 833-838 (2011); Thompson et al., Methods in Enzymology 503, 293-319 (2012); Thompson, D. B., et al., Chemistry & Biology 19 (7), 831-843 (2012). The methods of the super charged proteins may be used and/or adapted for delivery of the CRISPR Cas system of the present invention. These systems of Dr. Lui and documents herein in conjunction with herein teaching can be employed in the delivery of CRISPR Cas system(s) or component(s) thereof or nucleic acid molecule(s) coding therefor.

### Cell Penetrating Peptides (CPPs)

[0784] In yet another embodiment, cell penetrating peptides (CPPs) are contemplated for the delivery of the CRISPR Cas system. CPPs are short peptides that facilitate cellular uptake of various molecular cargo (from nanosize particles to small chemical molecules and large fragments of DNA). The term “cargo” as used herein includes but is not limited to the group consisting of therapeutic agents, diagnostic probes, peptides, nucleic acids, antisense oligonucleotides, plasmids, proteins, particles, including nanoparticles, liposomes, chromophores, small molecules and radioactive materials. In aspects of the invention, the cargo may also comprise any component of the CRISPR Cas system or the entire functional CRISPR Cas system. Aspects of the present invention further provide methods for delivering a desired cargo into a subject comprising: (a) preparing a complex comprising the cell penetrating peptide of the present invention and a desired cargo, and (b) orally, intraarticularly, intraperitoneally, intrathecally, intrarterially, intranasally, intraparenchymally, subcutaneously, intramuscularly, intravenously, dermally, intrarectally, or topically administering the complex to a subject. The cargo is associated with the peptides either through chemical linkage via covalent bonds or through non-covalent interactions.

[0785] The function of the CPPs are to deliver the cargo into cells, a process that commonly occurs through endocytosis with the cargo delivered to the endosomes of living mammalian cells. Cell-penetrating peptides are of different sizes, amino acid sequences, and charges but all CPPs have one distinct characteristic, which is the ability to translocate the plasma membrane and facilitate the delivery of various molecular cargoes to the cytoplasm or an organelle. CPP translocation may be classified into three main entry mechanisms: direct penetration in the membrane, endocytosis-mediated entry, and translocation through the formation of a transitory structure. CPPs have found numerous applications in medicine as drug delivery agents in the treatment of different diseases including cancer and virus inhibitors, as well as contrast agents for cell labeling. Examples of the latter include acting as a carrier for GFP, MRI contrast agents, or quantum dots. CPPs hold great potential as in vitro and in vivo delivery vectors for use in research and medicine. CPPs typically have an amino acid composition that either contains a high relative abundance of positively charged amino acids such as lysine or arginine or has sequences that contain an alternating pattern of polar/charged amino acids and non-polar, hydrophobic amino acids. These two types of structures are referred to as polycationic or amphipathic, respectively. A third class of CPPs are the hydrophobic peptides, containing only apolar residues, with low net charge or have hydrophobic amino acid groups that are crucial for cellular uptake. One of the initial CPPs discovered was the trans-activating transcriptional activator (Tat) from Human Immunodeficiency Virus 1 (HIV-1) which was found to be efficiently taken up from the surrounding media by numerous cell types in culture. Since then, the number of known CPPs has expanded considerably and small molecule synthetic analogues with more effective protein transduction properties have been generated. CPPs include but are not limited to Penetratin, Tat (48-60), Transportan, and (R-AhX-R4) (Ahx=aminohexanoyl).

[0786] U.S. Pat. No. 8,372,951, provides a CPP derived from eosinophil cationic protein (ECP) which exhibits highly cell-penetrating efficiency and low toxicity. Aspects of delivering the CPP with its cargo into a vertebrate subject are also provided. Further aspects of CPPs and their delivery are described in U.S. Pat. Nos. 8,575,305; 8,614,194 and 8,044,019. CPPs can be used to deliver the CRISPR-Cas system or components thereof. That CPPs can be employed to deliver the CRISPR-Cas system or components thereof is also provided in the manuscript “Gene disruption by cell-penetrating peptide-mediated delivery of Cas9 protein and guide RNA”, by Suresh Ramakrishna, Abu-Bonsrah Kwaku Dad, Jagadish Beloor, et al. Genome Res. 2014 Apr. 2. [Epub ahead of print], incorporated by reference in its entirety, wherein it is demonstrated that treatment with CPP-conjugated recombinant Cas9 protein and CPP-complexed guide RNAs lead to endogenous gene disruptions in human cell lines. In the paper the Cas9 protein was conjugated to CPP via a thioether bond, whereas the guide RNA was complexed with CPP, forming condensed, positively charged particles. It was shown that simultaneous and sequential treatment of human cells, including embryonic stem cells, dermal fibroblasts, HEK293T cells, HeLa cells, and embryonic carcinoma cells, with the modified Cas9 and guide RNA led to efficient gene disruptions with reduced off-target mutations relative to plasmid transfections.

### Implantable Devices

[0787] In another embodiment, implantable devices are also contemplated for delivery of the CRISPR Cas system or component(s) thereof or nucleic acid molecule(s) coding therefor. For example, US Patent Publication 20110195123 discloses an implantable medical device which elutes a drug locally and in prolonged period is provided, including several types of such a device, the treatment modes of implementation and methods of implantation. The device comprising of polymeric substrate, such as a matrix for example, that is used as the device body, and drugs, and in some cases additional scaffolding materials, such as metals or additional polymers, and materials to enhance visibility and imaging. An implantable delivery device can be advantageous in providing release locally and over a prolonged period, where drug is released directly to the extracellular matrix (ECM) of the diseased area such as tumor, inflammation, degeneration or for symptomatic objectives, or to injured smooth muscle cells, or for prevention. One kind of drug is RNA, as disclosed above, and this system may be used/and or adapted to the CRISPR Cas system of the present invention. The modes of implantation in some embodiments are existing implantation procedures that are developed and used today for other treatments, including brachytherapy and needle biopsy. In such cases the dimensions of the new implant described in this invention are similar to the original implant. Typically a few devices are implanted during the same treatment procedure.

[0788] US Patent Publication 20110195123, provides a drug delivery implantable or insertable system, including systems applicable to a cavity such as the abdominal cavity and/or any other type of administration in which the drug delivery system is not anchored or attached, comprising a biostable and/or degradable and/or bioabsorbable polymeric substrate, which may for example optionally be a matrix. It should be noted that the term “insertion” also includes implantation. The drug delivery system is preferably implemented as a “Loder” as described in US Patent Publication 20110195123.

[0789] The polymer or plurality of polymers are biocompatible, incorporating an agent and/or plurality of agents, enabling the release of agent at a controlled rate, wherein the total volume of the polymeric substrate, such as a matrix for example, in some embodiments is optionally and preferably no greater than a maximum volume that permits a therapeutic level of the agent to be reached. As a non-limiting example, such a volume is preferably within the range of 0.1 m³ to 1000 mm³, as required by the volume for the agent load. The Loder may optionally be larger, for example when incorporated with a device whose size is determined by functionality, for example and without limitation, a knee joint, an intra-uterine or cervical ring and the like.

[0790] The drug delivery system (for delivering the composition) is designed in some embodiments to preferably employ degradable polymers, wherein the main release mechanism is bulk erosion; or in some embodiments, non degradable, or slowly degraded polymers are used, wherein the main release mechanism is diffusion rather than bulk erosion, so that the outer part functions as membrane, and its internal part functions as a drug reservoir, which practically is not affected by the surroundings for an extended period (for example from about a week to about a few months). Combinations of different polymers with different release mechanisms may also optionally be used. The concentration gradient at the surface is preferably maintained effectively constant during a significant period of the total drug releasing period, and therefore the diffusion rate is effectively constant (termed “zero mode” diffusion). By the term “constant” it is meant a diffusion rate that is preferably maintained above the lower threshold of therapeutic effectiveness, but which may still optionally feature an initial burst and/or may fluctuate, for example increasing and decreasing to a certain degree. The diffusion rate is preferably so maintained for a prolonged period, and it can be considered constant to a certain level to optimize the therapeutically effective period, for example the effective silencing period.

[0791] The drug delivery system optionally and preferably is designed to shield the nucleotide based therapeutic agent from degradation, whether chemical in nature or due to attack from enzymes and other factors in the body of the subject.

[0792] The drug delivery system of US Patent Publication 20110195123 is optionally associated with sensing and/or activation appliances that are operated at and/or after implantation of the device, by non and/or minimally invasive methods of activation and/or acceleration/deceleration, for example optionally including but not limited to thermal heating and cooling, laser beams, and ultrasonic, including focused ultrasound and/or RF (radiofrequency) methods or devices.

[0793] According to some embodiments of US Patent Publication 20110195123, the site for local delivery may optionally include target sites characterized by high abnormal proliferation of cells, and suppressed apoptosis, including tumors, active and or chronic inflammation and infection including autoimmune diseases states, degenerating tissue including muscle and nervous tissue, chronic pain, degenerative sites, and location of bone fractures and other wound locations for enhancement of regeneration of tissue, and injured cardiac, smooth and striated muscle.

[0794] The site for implantation of the composition, or target site, preferably features a radius, area and/or volume that is sufficiently small for targeted local delivery. For example, the target site optionally has a diameter in a range of from about 0.1 mm to about 5 cm.

[0795] The location of the target site is preferably selected for maximum therapeutic efficacy. For example, the composition of the drug delivery system (optionally with a device for implantation as described above) is optionally and preferably implanted within or in the proximity of a tumor environment, or the blood supply associated thereof.

[0796] For example the composition (optionally with the device) is optionally implanted within or in the proximity to pancreas, prostate, breast, liver, via the nipple, within the vascular system and so forth.

[0797] The target location is optionally selected from the group comprising, consisting essentially of, or consisting of (as non-limiting examples only, as optionally any site within the body may be suitable for implanting a Loder): 1. brain at degenerative sites like in Parkinson or Alzheimer disease at the basal ganglia, white and gray matter; 2. spine as in the case of amyotrophic lateral sclerosis (ALS); 3. uterine cervix to prevent HPV infection; 4. active and chronic inflammatory joints; 5. dermis as in the case of psoriasis; 6. sympathetic and sensoric nervous sites for analgesic effect; 7. Intra osseous implantation; 8. acute and chronic infection sites; 9. Intra vaginal; 10. Inner ear—auditory system, labyrinth of the inner ear, vestibular system; 11. Intra tracheal; 12. Intra-cardiac; coronary, epicardiac; 13. urinary bladder; 14. biliary system; 15. parenchymal tissue including and not limited to the kidney, liver, spleen; 16. lymph nodes; 17. salivary glands; 18. dental gums; 19. Intra-articular (into joints); 20. Intra-ocular; 21. Brain tissue; 22. Brain ventricles; 23. Cavities, including abdominal cavity (for example but without limitation, for ovary cancer); 24. Intra esophageal and 25. Intra rectal.

[0798] Optionally insertion of the system (for example a device containing the composition) is associated with injection of material to the ECM at the target site and the vicinity of that site to affect local pH and/or temperature and/or other biological factors affecting the diffusion of the drug and/or drug kinetics in the ECM, of the target site and the vicinity of such a site.

[0799] Optionally, according to some embodiments, the release of said agent could be associated with sensing and/or activation appliances that are operated prior and/or at and/or after insertion, by non and/or minimally invasive and/or else methods of activation and/or acceleration/deceleration, including laser beam, radiation, thermal heating and cooling, and ultrasonic, including focused ultrasound and/or RF (radiofrequency) methods or devices, and chemical activators.

[0800] According to other embodiments of US Patent Publication 20110195123, the drug preferably comprises a RNA, for example for localized cancer cases in breast, pancreas, brain, kidney, bladder, lung, and prostate as described below. Although exemplified with RNAi, many drugs are applicable to be encapsulated in Loder, and can be used in association with this invention, as long as such drugs can be encapsulated with the Loder substrate, such as a matrix for example, and this system may be used and/or adapted to deliver the CRISPR Cas system of the present invention.

[0801] As another example of a specific application, neuro and muscular degenerative diseases develop due to abnormal gene expression. Local delivery of RNAs may have therapeutic properties for interfering with such abnormal gene expression. Local delivery of anti apoptotic, anti inflammatory and anti degenerative drugs including small drugs and macromolecules may also optionally be therapeutic. In such cases the Loder is applied for prolonged release at constant rate and/or through a dedicated device that is implanted separately. All of this may be used and/or adapted to the CRISPR Cas system of the present invention.

[0802] As yet another example of a specific application, psychiatric and cognitive disorders are treated with gene modifiers. Gene knockdown is a treatment option. Loders locally delivering agents to central nervous system sites are therapeutic options for psychiatric and cognitive disorders including but not limited to psychosis, bi-polar diseases, neurotic disorders and behavioral maladies. The Loders could also deliver locally drugs including small drugs and macromolecules upon implantation at specific brain sites. All of this may be used and/or adapted to the CRISPR Cas system of the present invention.

[0803] As another example of a specific application, silencing of innate and/or adaptive immune mediators at local sites enables the prevention of organ transplant rejection. Local delivery of RNAs and immunomodulating reagents with the Loder implanted into the transplanted organ and/or the implanted site renders local immune suppression by repelling immune cells such as CD8 activated against the transplanted organ. All of this may be used/and or adapted to the CRISPR Cas system of the present invention.

[0804] As another example of a specific application, vascular growth factors including VEGFs and angiogenin and others are essential for neovascularization. Local delivery of the factors, peptides, peptidomimetics, or suppressing their repressors is an important therapeutic modality; silencing the repressors and local delivery of the factors, peptides, macromolecules and small drugs stimulating angiogenesis with the Loder is therapeutic for peripheral, systemic and cardiac vascular disease.

[0805] The method of insertion, such as implantation, may optionally already be used for other types of tissue implantation and/or for insertions and/or for sampling tissues, optionally without modifications, or alternatively optionally only with non-major modifications in such methods. Such methods optionally include but are not limited to brachytherapy methods, biopsy, endoscopy with and/or without ultrasound, such as ERCP, stereotactic methods into the brain tissue, Laparoscopy, including implantation with a laparoscope into joints, abdominal organs, the bladder wall and body cavities.

[0806] Implantable device technology herein discussed can be employed with herein teachings and hence by this disclosure and the knowledge in the art, CRISPR-Cas system or components thereof or nucleic acid molecules thereof or encoding or providing components may be delivered via an implantable device.

### Patient-Specific Screening Methods

[0807] A nucleic acid-targeting system that targets DNA, e.g., trinucleotide repeats can be used to screen patients or patent samples for the presence of such repeats. The repeats can be the target of the RNA of the nucleic acid-targeting system, and if there is binding thereto by the nucleic acid-targeting system, that binding can be detected, to thereby indicate that such a repeat is present. Thus, a nucleic acid-targeting system can be used to screen patients or patient samples for the presence of the repeat. The patient can then be administered suitable compound(s) to address the condition; or, can be administered a nucleic acid-targeting system to bind to and cause insertion, deletion or mutation and alleviate the condition.

[0808] The invention uses nucleic acids to bind target DNA sequences.

CRISPR Effector Protein mRNA and Guide RNA

[0809] CRISPR enzyme mRNA and guide RNA might also be delivered separately. CRISPR enzyme mRNA can be delivered prior to the guide RNA to give time for CRISPR enzyme to be expressed. CRISPR enzyme mRNA might be administered 1-12 hours (preferably around 2-6 hours) prior to the administration of guide RNA.

[0810] Alternatively, CRISPR enzyme mRNA and guide RNA can be administered together. Advantageously, a second booster dose of guide RNA can be administered 1-12 hours (preferably around 2-6 hours) after the initial administration of CRISPR enzyme mRNA+guide RNA.

[0811] The CRISPR effector protein of the present invention, i.e. Cpf1 effector protein is sometimes referred to herein as a CRISPR Enzyme. It will be appreciated that the effector protein is based on or derived from an enzyme, so the term ‘effector protein’ certainly includes ‘enzyme’ in some embodiments. However, it will also be appreciated that the effector protein may, as required in some embodiments, have DNA or RNA binding, but not necessarily cutting or nicking, activity, including a dead-Cas effector protein function.

[0812] Additional administrations of CRISPR enzyme mRNA and/or guide RNA might be useful to achieve the most efficient levels of genome modification. In some embodiments, phenotypic alteration is preferably the result of genome modification when a genetic disease is targeted, especially in methods of therapy and preferably where a repair template is provided to correct or alter the phenotype.

[0813] In some embodiments diseases that may be targeted include those concerned with disease-causing splice defects.

[0814] In some embodiments, cellular targets include Hemopoietic Stem/Progenitor Cells (CD34+); Human T cells; and Eye (retinal cells)—for example photoreceptor precursor cells.

[0815] In some embodiments Gene targets include: Human Beta Globin—HBB (for treating Sickle Cell Anemia, including by stimulating gene-conversion (using closely related HBD gene as an endogenous template)); CD3 (T-Cells); and CEP920—retina (eye).

[0816] In some embodiments disease targets also include: cancer; Sickle Cell Anemia (based on a point mutation); HIV; Beta-Thalassemia; and ophthalmic or ocular disease—for example Leber Congenital Amaurosis (LCA)-causing Splice Defect.

[0817] In some embodiments delivery methods include: Cationic Lipid Mediated “direct” delivery of Enzyme-Guide complex (RiboNucleoProtein) and electroporation of plasmid DNA.

[0818] Inventive methods can further comprise delivery of templates, such as repair templates, which may be dsODN or ssODN, see below. Delivery of templates may be via the cotemporaneous or separate from delivery of any or all the CRISPR enzyme or guide and via the same delivery mechanism or different. In some embodiments, it is preferred that the template is delivered together with the guide, and, preferably, also the CRISPR enzyme. An example may be an AAV vector.

[0819] Inventive methods can further comprise: (a) delivering to the cell a double-stranded oligodeoxynucleotide (dsODN) comprising overhangs complimentary to the overhangs created by said double strand break, wherein said dsODN is integrated into the locus of interest; or—(b) delivering to the cell a single-stranded oligodeoxynucleotide (ssODN), wherein said ssODN acts as a template for homology directed repair of said double strand break. Inventive methods can be for the prevention or treatment of disease in an individual, optionally wherein said disease is caused by a defect in said locus of interest. Inventive methods can be conducted in vivo in the individual or ex vivo on a cell taken from the individual, optionally wherein said cell is returned to the individual.

[0820] For minimization of toxicity and off-target effect, it will be important to control the concentration of CRISPR enzyme mRNA and guide RNA delivered. Optimal concentrations of CRISPR enzyme mRNA and guide RNA can be determined by testing different concentrations in a cellular or animal model and using deep sequencing the analyze the extent of modification at potential off-target genomic loci. For example, for the guide sequence targeting 5′-GAGTCCGAGCAGAAGAAGAA-3′ (SEQ ID NO: 23) in the EMX1 gene of the human genome, deep sequencing can be used to assess the level of modification at the following two off-target loci, 1: 5′-GAGTCCTAGCAGGAGAAGAA-3′ (SEQ ID NO: 24) and 2: 5′-GAGTCTAAGCAGAAGAAGAA-3′ (SEQ ID NO: 25). The concentration that gives the highest level of on-target modification while minimizing the level of off-target modification should be chosen for in vivo delivery.

### Inducible Systems

[0821] In some embodiments, a CRISPR enzyme may form a component of an inducible system. The inducible nature of the system would allow for spatiotemporal control of gene editing or gene expression using a form of energy. The form of energy may include but is not limited to electromagnetic radiation, sound energy, chemical energy and thermal energy. Examples of inducible system include tetracycline inducible promoters (Tet-On or Tet-Off), small molecule two-hybrid transcription activations systems (FKBP, ABA, etc), or light inducible systems (Phytochrome, LOV domains, or cryptochrome). In one embodiment, the CRISPR enzyme may be a part of a Light Inducible Transcriptional Effector (LITE) to direct changes in transcriptional activity in a sequence-specific manner. The components of a light may include a CRISPR enzyme, a light-responsive cytochrome heterodimer (e.g. from Arabidopsis thaliana), and a transcriptional activation/repression domain. Further examples of inducible DNA binding proteins and methods for their use are provided in U.S. 61/736,465 and U.S. 61/721,283, and WO 2014/018423 A2 which is hereby incorporated by reference in its entirety.

### Self-Inactivating Systems

[0822] Once all copies of a gene in the genome of a cell have been edited, continued CRISPR/Cpf1p expression in that cell is no longer necessary. Indeed, sustained expression would be undesirable in case of off-target effects at unintended genomic sites, etc. Thus time-limited expression would be useful. Inducible expression offers one approach, but in addition Applicants have engineered a Self-Inactivating CRISPR system that relies on the use of a non-coding guide target sequence within the CRISPR vector itself. Thus, after expression begins, the CRISPR-Cas system will lead to its own destruction, but before destruction is complete it will have time to edit the genomic copies of the target gene (which, with a normal point mutation in a diploid cell, requires at most two edits). Simply, the self inactivating CRISPR-Cas system includes additional RNA (i.e., guide RNA) that targets the coding sequence for the CRISPR enzyme itself or that targets one or more non-coding guide target sequences complementary to unique sequences present in one or more of the following:

(a) within the promoter driving expression of the non-coding RNA elements,
(b) within the promoter driving expression of the Cpf1 effector protein gene,
(c) within 100 bp of the ATG translational start codon in the Cpf1 effector protein coding sequence,
(d) within the inverted terminal repeat (iTR) of a viral delivery vector, e.g., in the AAV genome.

[0823] Furthermore, that RNA can be delivered via a vector, e.g., a separate vector or the same vector that is encoding the CRISPR complex. When provided by a separate vector, the CRISPR RNA that targets Cas expression can be administered sequentially or simultaneously. When administered sequentially, the CRISPR RNA that targets Cas expression is to be delivered after the CRISPR RNA that is intended for e.g. gene editing or gene engineering. This period may be a period of minutes (e.g. 5 minutes, 10 minutes, 20 minutes, 30 minutes, 45 minutes, 60 minutes). This period may be a period of hours (e.g. 2 hours, 4 hours, 6 hours, 8 hours, 12 hours, 24 hours). This period may be a period of days (e.g. 2 days, 3 days, 4 days, 7 days). This period may be a period of weeks (e.g. 2 weeks, 3 weeks, 4 weeks). This period may be a period of months (e.g. 2 months, 4 months, 8 months, 12 months). This period may be a period of years (2 years, 3 years, 4 years). In this fashion, the Cas enzyme associates with a first gRNA capable of hybridizing to a first target, such as a genomic locus or loci of interest and undertakes the function(s) desired of the CRISPR-Cas system (e.g., gene engineering); and subsequently the Cas enzyme may then associate with the second gRNA capable of hybridizing to the sequence comprising at least part of the Cas or CRISPR cassette. Where the guide RNA targets the sequences encoding expression of the Cas protein, the enzyme becomes impeded and the system becomes self inactivating. In the same manner, CRISPR RNA that targets Cas expression applied via, for example liposome, lipofection, particles, microvesicles as explained herein, may be administered sequentially or simultaneously. Similarly, self-inactivation may be used for inactivation of one or more guide RNA used to target one or more targets.

[0824] In some aspects, a single gRNA is provided that is capable of hybridization to a sequence downstream of a CRISPR enzyme start codon, whereby after a period of time there is a loss of the CRISPR enzyme expression. In some aspects, one or more gRNA(s) are provided that are capable of hybridization to one or more coding or non-coding regions of the polynucleotide encoding the CRISPR-Cas system, whereby after a period of time there is a inactivation of one or more, or in some cases all, of the CRISPR-Cas system. In some aspects of the system, and not to be limited by theory, the cell may comprise a plurality of CRISPR-Cas complexes, wherein a first subset of CRISPR complexes comprise a first guide RNA capable of targeting a genomic locus or loci to be edited, and a second subset of CRISPR complexes comprise at least one second guide RNA capable of targeting the polynucleotide encoding the CRISPR-Cas system, wherein the first subset of CRISPR-Cas complexes mediate editing of the targeted genomic locus or loci and the second subset of CRISPR complexes eventually inactivate the CRISPR-Cas system, thereby inactivating further CRISPR-Cas expression in the cell.

[0825] Thus the invention provides a CRISPR-Cas system comprising one or more vectors for delivery to a eukaryotic cell, wherein the vector(s) encode(s): (i) a CRISPR enzyme; (ii) a first guide RNA capable of hybridizing to a target sequence in the cell; (iii) a second guide RNA capable of hybridizing to one or more target sequence(s) in the vector which encodes the CRISPR enzyme, when expressed within the cell: the first guide RNA directs sequence-specific binding of a first CRISPR complex to the target sequence in the cell; the second guide RNA directs sequence-specific binding of a second CRISPR complex to the target sequence in the vector which encodes the CRISPR enzyme; the CRISPR complexes comprise a CRISPR enzyme bound to a guide RNA, such that a guide RNA can hybridize to its target sequence; and the second CRISPR complex inactivates the CRISPR-Cas system to prevent continued expression of the CRISPR enzyme by the cell.

[0826] The various coding sequences (CRISPR enzyme and guide RNAs) can be included on a single vector or on multiple vectors. For instance, it is possible to encode the enzyme on one vector and the various RNA sequences on another vector, or to encode the enzyme and one guide RNA on one vector, and the remaining guide RNA on another vector, or any other permutation. In general, a system using a total of one or two different vectors is preferred.

[0827] Where multiple vectors are used, it is possible to deliver them in unequal numbers, and ideally with an excess of a vector which encodes the first guide RNA relative to the second guide RNA, thereby assisting in delaying final inactivation of the CRISPR system until genome editing has had a chance to occur.

[0828] The first guide RNA can target any target sequence of interest within a genome, as described elsewhere herein. The second guide RNA targets a sequence within the vector which encodes the CRISPR Cpf1 enzyme, and thereby inactivates the enzyme's expression from that vector. Thus the target sequence in the vector must be capable of inactivating expression. Suitable target sequences can be, for instance, near to or within the translational start codon for the Cpf1p coding sequence, in a non-coding sequence in the promoter driving expression of the non-coding RNA elements, within the promoter driving expression of the Cpf1p gene, within 100 bp of the ATG translational start codon in the Cas coding sequence, and/or within the inverted terminal repeat (iTR) of a viral delivery vector, e.g., in the AAV genome. A double stranded break near this region can induce a frame shift in the Cas coding sequence, causing a loss of protein expression. An alternative target sequence for the “self-inactivating” guide RNA would aim to edit/inactivate regulatory regions/sequences needed for the expression of the CRISPR-Cpf1 system or for the stability of the vector. For instance, if the promoter for the Cas coding sequence is disrupted then transcription can be inhibited or prevented. Similarly, if a vector includes sequences for replication, maintenance or stability then it is possible to target these. For instance, in a AAV vector a useful target sequence is within the iTR. Other useful sequences to target can be promoter sequences, polyadenlyation sites, etc.

[0829] Furthermore, if the guide RNAs are expressed in array format, the “self-inactivating” guide RNAs that target both promoters simultaneously will result in the excision of the intervening nucleotides from within the CRISPR-Cas expression construct, effectively leading to its complete inactivation. Similarly, excision of the intervening nucleotides will result where the guide RNAs target both ITRs, or targets two or more other CRISPR-Cas components simultaneously. Self-inactivation as explained herein is applicable, in general, with CRISPR-Cas systems in order to provide regulation of the CRISPR-Cas. For example, self-inactivation as explained herein may be applied to the CRISPR repair of mutations, for example expansion disorders, as explained herein. As a result of this self-inactivation, CRISPR repair is only transiently active.

[0830] Addition of non-targeting nucleotides to the 5′ end (e.g. 1-10 nucleotides, preferably 1-5 nucleotides) of the “self-inactivating” guide RNA can be used to delay its processing and/or modify its efficiency as a means of ensuring editing at the targeted genomic locus prior to CRISPR-Cas shutdown.

[0831] In one aspect of the self-inactivating AAV-CRISPR-Cas system, plasmids that co-express one or more guide RNA targeting genomic sequences of interest (e.g. 1-2, 1-5, 1-10, 1-15, 1-20, 1-30) may be established with “self-inactivating” guide RNAs that target an SpCas9 sequence at or near the engineered ATG start site (e.g. within 5 nucleotides, within 15 nucleotides, within 30 nucleotides, within 50 nucleotides, within 100 nucleotides). A regulatory sequence in the U6 promoter region can also be targeted with an guide RNA. The U6-driven guide RNAs may be designed in an array format such that multiple guide RNA sequences can be simultaneously released. When first delivered into target tissue/cells (left cell) guide RNAs begin to accumulate while Cas levels rise in the nucleus. Cas complexes with all of the guide RNAs to mediate genome editing and self-inactivation of the CRISPR-Cas plasmids.

[0832] One aspect of a self-inactivating CRISPR-Cas system is expression of singly or in tandem array format from 1 up to 4 or more different guide sequences; e.g. up to about 20 or about 30 guides sequences. Each individual self inactivating guide sequence may target a different target. Such may be processed from, e.g. one chimeric pol3 transcript. Pol3 promoters such as U6 or H1 promoters may be used. Pol2 promoters such as those mentioned throughout herein. Inverted terminal repeat (iTR) sequences may flank the Pol3 promoter-guide RNA(s)-Pol2 promoter-Cas.

[0833] One aspect of a tandem array transcript is that one or more guide(s) edit the one or more target(s) while one or more self inactivating guides inactivate the CRISPR-Cas system. Thus, for example, the described CRISPR-Cas system for repairing expansion disorders may be directly combined with the self-inactivating CRISPR-Cas system described herein. Such a system may, for example, have two guides directed to the target region for repair as well as at least a third guide directed to self-inactivation of the CRISPR-Cas. Reference is made to Application Ser. No. PCT/US2014/069897, entitled “Compositions And Methods Of Use Of Crispr-Cas Systems In Nucleotide Repeat Disorders,” published Dec. 12, 2014 as WO/2015/089351.

[0834] The guideRNA may be a control guide. For example it may be engineered to target a nucleic acid sequence encoding the CRISPR Enzyme itself, as described in US2015232881A1, the disclosure of which is hereby incorporated by reference. In some embodiments, a system or composition may be provided with just the guideRNA engineered to target the nucleic acid sequence encoding the CRISPR Enzyme. In addition, the system or composition may be provided with the guideRNA engineered to target the nucleic acid sequence encoding the CRISPR Enzyme, as well as nucleic acid sequence encoding the CRISPR Enzyme and, optionally a second guide RNA and, further optionally, a repair template. The second guideRNA may be the primary target of the CRISPR system or composition (such a therapeutic, diagnostic, knock out etc. as defined herein). In this way, the system or composition is self-inactivating. This is exemplified in relation to Cas9 in US2015232881A1 (also published as WO2015070083 (A1) referenced elsewhere herein, and may be extrapolated to Cpf1.

### Enzymes According to the Invention Used in a Multiplex (Tandem) Targeting Approach

[0835] The inventors have shown that CRISPR enzymes as defined herein can employ more than one RNA guide without losing activity. This enables the use of the CRISPR enzymes, systems or complexes as defined herein for targeting multiple DNA targets, genes or gene loci, with a single enzyme, system or complex as defined herein. The guide RNAs may be tandemly arranged, optionally separated by a nucleotide sequence such as a direct repeat as defined herein. The position of the different guide RNAs is the tandem does not influence the activity. It is noted that the terms “CRISPR-Cas system”, “CRISP-Cas complex” “CRISPR complex” and “CRISPR system” are used interchangeably. Also the terms “CRISPR enzyme”, “Cas enzyme”, or “CRISPR-Cas enzyme”, can be used interchangeably. In preferred embodiments, said CRISPR enzyme, CRISP-Cas enzyme or Cas enzyme is Cpf1, or any one of the modified or mutated variants thereof described herein elsewhere.

[0836] In one aspect, the invention provides a non-naturally occurring or engineered CRISPR enzyme, preferably a class 2 CRISPR enzyme, preferably a Type V or VI CRISPR enzyme as described herein, such as without limitation Cpf1 as described herein elsewhere, used for tandem or multiplex targeting. It is to be understood that any of the CRISPR (or CRISPR-Cas or Cas) enzymes, complexes, or systems according to the invention as described herein elsewhere may be used in such an approach. Any of the methods, products, compositions and uses as described herein elsewhere are equally applicable with the multiplex or tandem targeting approach further detailed below. By means of further guidance, the following particular aspects and embodiments are provided.

[0837] In one aspect, the invention provides for the use of a Cpf1 enzyme, complex or system as defined herein for targeting multiple gene loci. In one embodiment, this can be established by using multiple (tandem or multiplex) guide RNA (gRNA) sequences.

[0838] In one aspect, the invention provides methods for using one or more elements of a Cpf1 enzyme, complex or system as defined herein for tandem or multiplex targeting, wherein said CRISP system comprises multiple guide RNA sequences. Preferably, said gRNA sequences are separated by a nucleotide sequence, such as a direct repeat as defined herein elsewhere.

[0839] The Cpf1 enzyme, system or complex as defined herein provides an effective means for modifying multiple target polynucleotides. The Cpf1 enzyme, system or complex as defined herein has a wide variety of utility including modifying (e.g., deleting, inserting, translocating, inactivating, activating) one or more target polynucleotides in a multiplicity of cell types. As such the Cpf1 enzyme, system or complex as defined herein of the invention has a broad spectrum of applications in, e.g., gene therapy, drug screening, disease diagnosis, and prognosis, including targeting multiple gene loci within a single CRISPR system.

[0840] In one aspect, the invention provides a Cpf1 enzyme, system or complex as defined herein, i.e. a Cpf1 CRISPR-Cas complex having a Cpf1 protein having at least one destabilization domain associated therewith, and multiple guide RNAs that target multiple nucleic acid molecules such as DNA molecules, whereby each of said multiple guide RNAs specifically targets its corresponding nucleic acid molecule, e.g., DNA molecule. Each nucleic acid molecule target, e.g., DNA molecule can encode a gene product or encompass a gene locus. Using multiple guide RNAs hence enables the targeting of multiple gene loci or multiple genes. In some embodiments the Cpf1 enzyme may cleave the DNA molecule encoding the gene product. In some embodiments expression of the gene product is altered. The Cpf1 protein and the guide RNAs do not naturally occur together. The invention comprehends the guide RNAs comprising tandemly arranged guide sequences. The invention further comprehends coding sequences for the Cpf1 protein being codon optimized for expression in a eukaryotic cell. In a preferred embodiment the eukaryotic cell is a mammalian cell, a plant cell or a yeast cell and in a more preferred embodiment the mammalian cell is a human cell. Expression of the gene product may be decreased. The Cpf1 enzyme may form part of a CRISPR system or complex, which further comprises tandemly arranged guide RNAs (gRNAs) comprising a series of 2, 3, 4, 5, 6, 7, 8, 9, 10, 15, 25, 25, 30, or more than 30 guide sequences, each capable of specifically hybridizing to a target sequence in a genomic locus of interest in a cell. In some embodiments, the functional Cpf1 CRISPR system or complex binds to the multiple target sequences. In some embodiments, the functional CRISPR system or complex may edit the multiple target sequences, e.g., the target sequences may comprise a genomic locus, and in some embodiments there may be an alteration of gene expression. In some embodiments, the functional CRISPR system or complex may comprise further functional domains. In some embodiments, the invention provides a method for altering or modifying expression of multiple gene products. The method may comprise introducing into a cell containing said target nucleic acids, e.g., DNA molecules, or containing and expressing target nucleic acid, e.g., DNA molecules; for instance, the target nucleic acids may encode gene products or provide for expression of gene products (e.g., regulatory sequences).

[0841] In preferred embodiments the CRISPR enzyme used for multiplex targeting is Cpf1, or the CRISPR system or complex comprises Cpf1. In some embodiments, the CRISPR enzyme used for multiplex targeting is AsCpf1, or the CRISPR system or complex used for multiplex targeting comprises an AsCpf1. In some embodiments, the CRISPR enzyme is an LbCpf1, or the CRISPR system or complex comprises LbCpf1. In some embodiments, the Cpf1 enzyme used for multiplex targeting cleaves both strands of DNA to produce a double strand break (DSB). In some embodiments, the CRISPR enzyme used for multiplex targeting is a nickase. In some embodiments, the Cpf1 enzyme used for multiplex targeting is a dual nickase. In some embodiments, the Cpf1 enzyme used for multiplex targeting is a Cpf1 enzyme such as a DD Cpf1 enzyme as defined herein elsewhere.

[0842] In some general embodiments, the Cpf1 enzyme used for multiplex targeting is associated with one or more functional domains. In some more specific embodiments, the CRISPR enzyme used for multiplex targeting is a dead Cpf1 as defined herein elsewhere.

[0843] In an aspect, the present invention provides a means for delivering the Cpf1 enzyme, system or complex for use in multiple targeting as defined herein or the polynucleotides defined herein. Non-limiting examples of such delivery means are e.g. particle(s) delivering component(s) of the complex, vector(s) comprising the polynucleotide(s) discussed herein (e.g., encoding the CRISPR enzyme, providing the nucleotides encoding the CRISPR complex). In some embodiments, the vector may be a plasmid or a viral vector such as AAV, or lentivirus. Transient transfection with plasmids, e.g., into HEK cells may be advantageous, especially given the size limitations of AAV and that while Cpf1 fits into AAV, one may reach an upper limit with additional guide RNAs.

[0844] Also provided is a model that constitutively expresses the Cpf1 enzyme, complex or system as used herein for use in multiplex targeting. The organism may be transgenic and may have been transfected with the present vectors or may be the offspring of an organism so transfected. In a further aspect, the present invention provides compositions comprising the CRISPR enzyme, system and complex as defined herein or the polynucleotides or vectors described herein. Also provides are Cpf1 CRISPR systems or complexes comprising multiple guide RNAs, preferably in a tandemly arranged format. Said different guide RNAs may be separated by nucleotide sequences such as direct repeats.

[0845] Also provided is a method of treating a subject, e.g., a subject in need thereof, comprising inducing gene editing by transforming the subject with the polynucleotide encoding the Cpf1 CRISPR system or complex or any of polynucleotides or vectors described herein and administering them to the subject. A suitable repair template may also be provided, for example delivered by a vector comprising said repair template. Also provided is a method of treating a subject, e.g., a subject in need thereof, comprising inducing transcriptional activation or repression of multiple target gene loci by transforming the subject with the polynucleotides or vectors described herein, wherein said polynucleotide or vector encodes or comprises the Cpf1 enzyme, complex or system comprising multiple guide RNAs, preferably tandemly arranged. Where any treatment is occurring ex vivo, for example in a cell culture, then it will be appreciated that the term ‘subject’ may be replaced by the phrase “cell or cell culture.”

[0846] Compositions comprising Cpf1 enzyme, complex or system comprising multiple guide RNAs, preferably tandemly arranged, or the polynucleotide or vector encoding or comprising said Cpf1 enzyme, complex or system comprising multiple guide RNAs, preferably tandemly arranged, for use in the methods of treatment as defined herein elsewhere are also provided. A kit of parts may be provided including such compositions. Use of said composition in the manufacture of a medicament for such methods of treatment are also provided. Use of a Cpf1 CRISPR system in screening is also provided by the present invention, e.g., gain of function screens. Cells which are artificially forced to overexpress a gene are be able to down regulate the gene over time (re-establishing equilibrium) e.g. by negative feedback loops. By the time the screen starts the unregulated gene might be reduced again. Using an inducible Cpf1 activator allows one to induce transcription right before the screen and therefore minimizes the chance of false negative hits. Accordingly, by use of the instant invention in screening, e.g., gain of function screens, the chance of false negative results may be minimized.

[0847] In one aspect, the invention provides an engineered, non-naturally occurring CRISPR system comprising a Cpf1 protein and multiple guide RNAs that each specifically target a DNA molecule encoding a gene product in a cell, whereby the multiple guide RNAs each target their specific DNA molecule encoding the gene product and the Cpf1 protein cleaves the target DNA molecule encoding the gene product, whereby expression of the gene product is altered; and, wherein the CRISPR protein and the guide RNAs do not naturally occur together. The invention comprehends the multiple guide RNAs comprising multiple guide sequences, preferably separated by a nucleotide sequence such as a direct repeat. In an embodiment of the invention the CRISPR protein is a type V or VI CRISPR-Cas protein and in a more preferred embodiment the CRISPR protein is a Cpf1 protein. The invention further comprehends a Cpf1 protein being codon optimized for expression in a eukaryotic cell. In a preferred embodiment the eukaryotic cell is a mammalian cell and in a more preferred embodiment the mammalian cell is a human cell. In a further embodiment of the invention, the expression of the gene product is decreased.

[0848] In another aspect, the invention provides an engineered, non-naturally occurring vector system comprising one or more vectors comprising a first regulatory element operably linked to the multiple Cpf1 CRISPR system guide RNAs that each specifically target a DNA molecule encoding a gene product and a second regulatory element operably linked coding for a CRISPR protein. Both regulatory elements may be located on the same vector or on different vectors of the system. The multiple guide RNAs target the multiple DNA molecules encoding the multiple gene products in a cell and the CRISPR protein may cleave the multiple DNA molecules encoding the gene products (it may cleave one or both strands or have substantially no nuclease activity), whereby expression of the multiple gene products is altered; and, wherein the CRISPR protein and the multiple guide RNAs do not naturally occur together. In a preferred embodiment the CRISPR protein is Cpf1 protein, optionally codon optimized for expression in a eukaryotic cell. In a preferred embodiment the eukaryotic cell is a mammalian cell, a plant cell or a yeast cell and in a more preferred embodiment the mammalian cell is a human cell. In a further embodiment of the invention, the expression of each of the multiple gene products is altered, preferably decreased.

[0849] In one aspect, the invention provides a vector system comprising one or more vectors. In some embodiments, the system comprises: (a) a first regulatory element operably linked to a direct repeat sequence and one or more insertion sites for inserting one or more guide sequences up- or downstream (whichever applicable) of the direct repeat sequence, wherein when expressed, the one or more guide sequence(s) direct(s) sequence-specific binding of the CRISPR complex to the one or more target sequence(s) in a eukaryotic cell, wherein the CRISPR complex comprises a Cpf1 enzyme complexed with the one or more guide sequence(s) that is hybridized to the one or more target sequence(s); and (b) a second regulatory element operably linked to an enzyme-coding sequence encoding said Cpf1 enzyme, preferably comprising at least one nuclear localization sequence and/or at least one NES; wherein components (a) and (b) are located on the same or different vectors of the system. In some embodiments, component (a) further comprises two or more guide sequences operably linked to the first regulatory element, wherein when expressed, each of the two or more guide sequences direct sequence specific binding of a Cpf1 CRISPR complex to a different target sequence in a eukaryotic cell. In some embodiments, the CRISPR complex comprises one or more nuclear localization sequences and/or one or more NES of sufficient strength to drive accumulation of said Cpf1 CRISPR complex in a detectable amount in or out of the nucleus of a eukaryotic cell. In some embodiments, the first regulatory element is a polymerase III promoter. In some embodiments, the second regulatory element is a polymerase II promoter. In some embodiments, each of the guide sequences is at least 16, 17, 18, 19, 20, 25 nucleotides, or between 16-30, or between 16-25, or between 16-20 nucleotides in length.

[0850] Recombinant expression vectors can comprise the polynucleotides encoding the Cpf1 enzyme, system or complex for use in multiple targeting as defined herein in a form suitable for expression of the nucleic acid in a host cell, which means that the recombinant expression vectors include one or more regulatory elements, which may be selected on the basis of the host cells to be used for expression, that is operatively-linked to the nucleic acid sequence to be expressed. Within a recombinant expression vector, “operably linked” is intended to mean that the nucleotide sequence of interest is linked to the regulatory element(s) in a manner that allows for expression of the nucleotide sequence (e.g., in an in vitro transcription/translation system or in a host cell when the vector is introduced into the host cell).

[0851] In some embodiments, a host cell is transiently or non-transiently transfected with one or more vectors comprising the polynucleotides encoding the Cpf1 enzyme, system or complex for use in multiple targeting as defined herein. In some embodiments, a cell is transfected as it naturally occurs in a subject. In some embodiments, a cell that is transfected is taken from a subject. In some embodiments, the cell is derived from cells taken from a subject, such as a cell line. A wide variety of cell lines for tissue culture are known in the art and exemplified herein elsewhere. Cell lines are available from a variety of sources known to those with skill in the art (see, e.g., the American Type Culture Collection (ATCC) (Manassas, Va.)). In some embodiments, a cell transfected with one or more vectors comprising the polynucleotides encoding the Cpf1 enzyme, system or complex for use in multiple targeting as defined herein is used to establish a new cell line comprising one or more vector-derived sequences. In some embodiments, a cell transiently transfected with the components of a Cpf1 CRISPR system or complex for use in multiple targeting as described herein (such as by transient transfection of one or more vectors, or transfection with RNA), and modified through the activity of a Cpf1 CRISPR system or complex, is used to establish a new cell line comprising cells containing the modification but lacking any other exogenous sequence. In some embodiments, cells transiently or non-transiently transfected with one or more vectors comprising the polynucleotides encoding the Cpf1 enzyme, system or complex for use in multiple targeting as defined herein, or cell lines derived from such cells are used in assessing one or more test compounds.

[0852] The term “regulatory element” is as defined herein elsewhere.

[0853] Advantageous vectors include lentiviruses and adeno-associated viruses, and types of such vectors can also be selected for targeting particular types of cells.

[0854] In one aspect, the invention provides a eukaryotic host cell comprising (a) a first regulatory element operably linked to a direct repeat sequence and one or more insertion sites for inserting one or more guide RNA sequences up- or downstream (whichever applicable) of the direct repeat sequence, wherein when expressed, the guide sequence(s) direct(s) sequence-specific binding of the Cpf1 CRISPR complex to the respective target sequence(s) in a eukaryotic cell, wherein the Cpf1 CRISPR complex comprises a Cpf1 enzyme complexed with the one or more guide sequence(s) that is hybridized to the respective target sequence(s); and/or (b) a second regulatory element operably linked to an enzyme-coding sequence encoding said Cpf1 enzyme comprising preferably at least one nuclear localization sequence and/or NES. In some embodiments, the host cell comprises components (a) and (b). In some embodiments, component (a), component (b), or components (a) and (b) are stably integrated into a genome of the host eukaryotic cell. In some embodiments, component (a) further comprises two or more guide sequences operably linked to the first regulatory element, and optionally separated by a direct repeat, wherein when expressed, each of the two or more guide sequences direct sequence specific binding of a Cpf1 CRISPR complex to a different target sequence in a eukaryotic cell. In some embodiments, the Cpf1 enzyme comprises one or more nuclear localization sequences and/or nuclear export sequences or NES of sufficient strength to drive accumulation of said CRISPR enzyme in a detectable amount in and/or out of the nucleus of a eukaryotic cell.

[0855] In some embodiments, the Cpf1 enzyme is a type V or VI CRISPR system enzyme. In some embodiments, the Cpf1 enzyme is a Cpf1 enzyme. In some embodiments, the Cpf1 enzyme is derived from Francisella tularensis 1, Francisella tularensis subsp. novicida, Prevotella albensis, Lachnospiraceae bacterium MC2017 1, Butyrivibrio proteoclasticus, Peregrinibacteria bacterium GW2011_GWA2_33_10, Parcubacteria bacterium GW2011_GWC2_44_17, Smithella sp. SCADC, Acidaminococcus sp. BV3L6, Lachnospiraceae bacterium MA2020, Candidatus Methanoplasma termitum, Eubacterium eligens, Moraxella bovoculi 237, Leptospira inadai, Lachnospiraceae bacterium ND2006, Porphyromonas crevioricanis 3, Prevotella disiens, or Porphyromonas macacae Cpf1, and may include further alterations or mutations of the Cpf1 as defined herein elsewhere, and can be a chimeric Cpf1. In some embodiments, the Cpf1 enzyme is codon-optimized for expression in a eukaryotic cell. In some embodiments, the CRISPR enzyme directs cleavage of one or two strands at the location of the target sequence. In some embodiments, the first regulatory element is a polymerase III promoter. In some embodiments, the second regulatory element is a polymerase II promoter. In some embodiments, the one or more guide sequence(s) is (are each) at least 16, 17, 18, 19, 20, 25 nucleotides, or between 16-30, or between 16-25, or between 16-20 nucleotides in length. When multiple guide RNAs are used, they are preferably separated by a direct repeat sequence. In an aspect, the invention provides a non-human eukaryotic organism; preferably a multicellular eukaryotic organism, comprising a eukaryotic host cell according to any of the described embodiments. In other aspects, the invention provides a eukaryotic organism; preferably a multicellular eukaryotic organism, comprising a eukaryotic host cell according to any of the described embodiments. The organism in some embodiments of these aspects may be an animal; for example a mammal. Also, the organism may be an arthropod such as an insect. The organism also may be a plant. Further, the organism may be a fungus.

[0856] In one aspect, the invention provides a kit comprising one or more of the components described herein. In some embodiments, the kit comprises a vector system and instructions for using the kit. In some embodiments, the vector system comprises (a) a first regulatory element operably linked to a direct repeat sequence and one or more insertion sites for inserting one or more guide sequences up- or downstream (whichever applicable) of the direct repeat sequence, wherein when expressed, the guide sequence directs sequence-specific binding of a Cpf1 CRISPR complex to a target sequence in a eukaryotic cell, wherein the Cpf1 CRISPR complex comprises a Cpf1 enzyme complexed with the guide sequence that is hybridized to the target sequence; and/or (b) a second regulatory element operably linked to an enzyme-coding sequence encoding said Cpf1 enzyme comprising a nuclear localization sequence. In some embodiments, the kit comprises components (a) and (b) located on the same or different vectors of the system. In some embodiments, component (a) further comprises two or more guide sequences operably linked to the first regulatory element, wherein when expressed, each of the two or more guide sequences direct sequence specific binding of a CRISPR complex to a different target sequence in a eukaryotic cell. In some embodiments, the Cpf1 enzyme comprises one or more nuclear localization sequences of sufficient strength to drive accumulation of said CRISPR enzyme in a detectable amount in the nucleus of a eukaryotic cell. In some embodiments, the CRISPR enzyme is a type V or VI CRISPR system enzyme. In some embodiments, the CRISPR enzyme is a Cpf1 enzyme. In some embodiments, the Cpf1 enzyme is derived from Francisella tularensis 1, Francisella tularensis subsp. novicida, Prevotella albensis, Lachnospiraceae bacterium MC2017 1, Butyrivibrio proteoclasticus, Peregrinibacteria bacterium GW2011_GWA2_33_10, Parcubacteria bacterium GW2011_GWC2_44_17, Smithella sp. SCADC, Acidaminococcus sp. BV3L6, Lachnospiraceae bacterium MA2020, Candidatus Methanoplasma termitum, Eubacterium eligens, Moraxella bovoculi 237, Leptospira inadai, Lachnospiraceae bacterium ND2006, Porphyromonas crevioricanis 3, Prevotella disiens, or Porphyromonas macacae Cpf1 (e.g., modified to have or be associated with at least one DD), and may include further alteration or mutation of the Cpf1, and can be a chimeric Cpf1. In some embodiments, the DD-CRISPR enzyme is codon-optimized for expression in a eukaryotic cell. In some embodiments, the DD-CRISPR enzyme directs cleavage of one or two strands at the location of the target sequence. In some embodiments, the DD-CRISPR enzyme lacks or substantially DNA strand cleavage activity (e.g., no more than 5% nuclease activity as compared with a wild type enzyme or enzyme not having the mutation or alteration that decreases nuclease activity). In some embodiments, the first regulatory element is a polymerase III promoter. In some embodiments, the second regulatory element is a polymerase II promoter. In some embodiments, the guide sequence is at least 16, 17, 18, 19, 20, 25 nucleotides, or between 16-30, or between 16-25, or between 16-20 nucleotides in length.

[0857] In one aspect, the invention provides a method of modifying multiple target polynucleotides in a host cell such as a eukaryotic cell. In some embodiments, the method comprises allowing a Cpf1CRISPR complex to bind to multiple target polynucleotides, e.g., to effect cleavage of said multiple target polynucleotides, thereby modifying multiple target polynucleotides, wherein the Cpf1CRISPR complex comprises a Cpf1 enzyme complexed with multiple guide sequences each of the being hybridized to a specific target sequence within said target polynucleotide, wherein said multiple guide sequences are linked to a direct repeat sequence. In some embodiments, said cleavage comprises cleaving one or two strands at the location of each of the target sequence by said Cpf1 enzyme. In some embodiments, said cleavage results in decreased transcription of the multiple target genes. In some embodiments, the method further comprises repairing one or more of said cleaved target polynucleotide by homologous recombination with an exogenous template polynucleotide, wherein said repair results in a mutation comprising an insertion, deletion, or substitution of one or more nucleotides of one or more of said target polynucleotides. In some embodiments, said mutation results in one or more amino acid changes in a protein expressed from a gene comprising one or more of the target sequence(s). In some embodiments, the method further comprises delivering one or more vectors to said eukaryotic cell, wherein the one or more vectors drive expression of one or more of: the Cpf1 enzyme and the multiple guide RNA sequence linked to a direct repeat sequence. In some embodiments, said vectors are delivered to the eukaryotic cell in a subject. In some embodiments, said modifying takes place in said eukaryotic cell in a cell culture. In some embodiments, the method further comprises isolating said eukaryotic cell from a subject prior to said modifying. In some embodiments, the method further comprises returning said eukaryotic cell and/or cells derived therefrom to said subject.

[0858] In one aspect, the invention provides a method of modifying expression of multiple polynucleotides in a eukaryotic cell. In some embodiments, the method comprises allowing a Cpf1 CRISPR complex to bind to multiple polynucleotides such that said binding results in increased or decreased expression of said polynucleotides; wherein the Cpf1 CRISPR complex comprises a Cpf1 enzyme complexed with multiple guide sequences each specifically hybridized to its own target sequence within said polynucleotide, wherein said guide sequences are linked to a direct repeat sequence. In some embodiments, the method further comprises delivering one or more vectors to said eukaryotic cells, wherein the one or more vectors drive expression of one or more of: the Cpf1 enzyme and the multiple guide sequences linked to the direct repeat sequences.

[0859] In one aspect, the invention provides a recombinant polynucleotide comprising multiple guide RNA sequences up- or downstream (whichever applicable) of a direct repeat sequence, wherein each of the guide sequences when expressed directs sequence-specific binding of a Cpf1CRISPR complex to its corresponding target sequence present in a eukaryotic cell. In some embodiments, the target sequence is a viral sequence present in a eukaryotic cell. In some embodiments, the target sequence is a proto-oncogene or an oncogene.

[0860] Aspects of the invention encompass a non-naturally occurring or engineered composition that may comprise a guide RNA (gRNA) comprising a guide sequence capable of hybridizing to a target sequence in a genomic locus of interest in a cell and a Cpf1 enzyme as defined herein that may comprise at least one or more nuclear localization sequences.

[0861] An aspect of the invention encompasses methods of modifying a genomic locus of interest to change gene expression in a cell by introducing into the cell any of the compositions described herein.

[0862] An aspect of the invention is that the above elements are comprised in a single composition or comprised in individual compositions. These compositions may advantageously be applied to a host to elicit a functional effect on the genomic level.

[0863] As used herein, the term “guide RNA” or “gRNA” has the leaning as used herein elsewhere and comprises any polynucleotide sequence having sufficient complementarity with a target nucleic acid sequence to hybridize with the target nucleic acid sequence and direct sequence-specific binding of a nucleic acid-targeting complex to the target nucleic acid sequence. Each gRNA may be designed to include multiple binding recognition sites (e.g., aptamers) specific to the same or different adapter protein. Each gRNA may be designed to bind to the promoter region −1000-+1 nucleic acids upstream of the transcription start site (i.e. TSS), preferably −200 nucleic acids. This positioning improves functional domains which affect gene activation (e.g., transcription activators) or gene inhibition (e.g., transcription repressors). The modified gRNA may be one or more modified gRNAs targeted to one or more target loci (e.g., at least 1 gRNA, at least 2 gRNA, at least 5 gRNA, at least 10 gRNA, at least 20 gRNA, at least 30 g RNA, at least 50 gRNA) comprised in a composition. Said multiple gRNA sequences can be tandemly arranged and are preferably separated by a direct repeat.

[0864] Thus, gRNA, the CRISPR enzyme as defined herein may each individually be comprised in a composition and administered to a host individually or collectively. Alternatively, these components may be provided in a single composition for administration to a host. Administration to a host may be performed via viral vectors known to the skilled person or described herein for delivery to a host (e.g., lentiviral vector, adenoviral vector, AAV vector). As explained herein, use of different selection markers (e.g., for lentiviral gRNA selection) and concentration of gRNA (e.g., dependent on whether multiple gRNAs are used) may be advantageous for eliciting an improved effect. On the basis of this concept, several variations are appropriate to elicit a genomic locus event, including DNA cleavage, gene activation, or gene deactivation. Using the provided compositions, the person skilled in the art can advantageously and specifically target single or multiple loci with the same or different functional domains to elicit one or more genomic locus events. The compositions may be applied in a wide variety of methods for screening in libraries in cells and functional modeling in vivo (e.g., gene activation of lincRNA and indentification of function; gain-of-function modeling; loss-of-function modeling; the use the compositions of the invention to establish cell lines and transgenic animals for optimization and screening purposes).

[0865] The current invention comprehends the use of the compositions of the current invention to establish and utilize conditional or inducible CRISPR transgenic cell/animals; see, e.g., Platt et al., Cell (2014), 159(2): 440-455, or PCT patent publications cited herein, such as WO 2014/093622 (PCT/US2013/074667). For example, cells or animals such as non-human animals, e.g., vertebrates or mammals, such as rodents, e.g., mice, rats, or other laboratory or field animals, e.g., cats, dogs, sheep, etc., may be ‘knock-in’ whereby the animal conditionally or inducibly expresses Cpf1 akin to Platt et al. The target cell or animal thus comprises the CRISPR enzyme (e.g., Cpf1) conditionally or inducibly (e.g., in the form of Cre dependent constructs), on expression of a vector introduced into the target cell, the vector expresses that which induces or gives rise to the condition of the CRISPR enzyme (e.g., Cpf1) expression in the target cell. By applying the teaching and compositions as defined herein with the known method of creating a CRISPR complex, inducible genomic events are also an aspect of the current invention. Examples of such inducible events have been described herein elsewhere.

[0866] In some embodiments, phenotypic alteration is preferably the result of genome modification when a genetic disease is targeted, especially in methods of therapy and preferably where a repair template is provided to correct or alter the phenotype.

[0867] In some embodiments diseases that may be targeted include those concerned with disease-causing splice defects.

[0868] In some embodiments, cellular targets include Hemopoietic Stem/Progenitor Cells (CD34+); Human T cells; and Eye (retinal cells)—for example photoreceptor precursor cells.

[0869] In some embodiments Gene targets include: Human Beta Globin—HBB (for treating Sickle Cell Anemia, including by stimulating gene-conversion (using closely related HBD gene as an endogenous template)); CD3 (T-Cells); and CEP920—retina (eye).

[0870] In some embodiments disease targets also include: cancer; Sickle Cell Anemia (based on a point mutation); HBV, HIV; Beta-Thalassemia; and ophthalmic or ocular disease—for example Leber Congenital Amaurosis (LCA)-causing Splice Defect. In some embodiments delivery methods include: Cationic Lipid Mediated “direct” delivery of Enzyme-Guide complex (RiboNucleoProtein) and electroporation of plasmid DNA.

[0871] Methods, products and uses described herein may be used for non-therapeutic purposes. Furthermore, any of the methods described herein may be applied in vitro and ex vivo.

[0872] In an aspect, provided is a non-naturally occurring or engineered composition comprising:

[0873] I. two or more CRISPR-Cas system polynucleotide sequences comprising

[0874] (a) a first guide sequence capable of hybridizing to a first target sequence in a polynucleotide locus,

[0875] (b) a second guide sequence capable of hybridizing to a second target sequence in a polynucleotide locus,

[0876] (c) a direct repeat sequence,

[0877] and

[0878] II. a Cpf1 enzyme or a second polynucleotide sequence encoding it,

[0879] wherein when transcribed, the first and the second guide sequences direct sequence-specific binding of a first and a second Cpf1 CRISPR complex to the first and second target sequences respectively,

[0880] wherein the first CRISPR complex comprises the Cpf1 enzyme complexed with the first guide sequence that is hybridizable to the first target sequence,

[0881] wherein the second CRISPR complex comprises the Cpf1 enzyme complexed with the second guide sequence that is hybridizable to the second target sequence, and

[0882] wherein the first guide sequence directs cleavage of one strand of the DNA duplex near the first target sequence and the second guide sequence directs cleavage of the other strand near the second target sequence inducing a double strand break, thereby modifying the organism or the non-human or non-animal organism. Similarly, compositions comprising more than two guide RNAs can be envisaged e.g. each specific for one target, and arranged tandemly in the composition or CRISPR system or complex as described herein.

[0883] In another embodiment, the Cpf1 is delivered into the cell as a protein. In another and particularly preferred embodiment, the Cpf1 is delivered into the cell as a protein or as a nucleotide sequence encoding it. Delivery to the cell as a protein may include delivery of a Ribonucleoprotein (RNP) complex, where the protein is complexed with the multiple guides.

[0884] In an aspect, host cells and cell lines modified by or comprising the compositions, systems or modified enzymes of present invention are provided, including stem cells, and progeny thereof.

[0885] In an aspect, methods of cellular therapy are provided, where, for example, a single cell or a population of cells is sampled or cultured, wherein that cell or cells is or has been modified ex vivo as described herein, and is then re-introduced (sampled cells) or introduced (cultured cells) into the organism. Stem cells, whether embryonic or induce pluripotent or totipotent stem cells, are also particularly preferred in this regard. But, of course, in vivo embodiments are also envisaged.

[0886] Inventive methods can further comprise delivery of templates, such as repair templates, which may be dsODN or ssODN, see below. Delivery of templates may be via the cotemporaneous or separate from delivery of any or all the CRISPR enzyme or guide RNAs and via the same delivery mechanism or different. In some embodiments, it is preferred that the template is delivered together with the guide RNAs and, preferably, also the CRISPR enzyme. An example may be an AAV vector where the CRISPR enzyme is AsCpf1 or LbCpf1.

[0887] Inventive methods can further comprise: (a) delivering to the cell a double-stranded oligodeoxynucleotide (dsODN) comprising overhangs complimentary to the overhangs created by said double strand break, wherein said dsODN is integrated into the locus of interest; or—(b) delivering to the cell a single-stranded oligodeoxynucleotide (ssODN), wherein said ssODN acts as a template for homology directed repair of said double strand break. Inventive methods can be for the prevention or treatment of disease in an individual, optionally wherein said disease is caused by a defect in said locus of interest. Inventive methods can be conducted in vivo in the individual or ex vivo on a cell taken from the individual, optionally wherein said cell is returned to the individual.

[0888] The invention also comprehends products obtained from using CRISPR enzyme or Cas enzyme or Cpf1 enzyme or CRISPR-CRISPR enzyme or CRISPR-Cas system or CRISPR-Cpf1 system for use in tandem or multiple targeting as defined herein.

### Kits

[0889] In one aspect, the invention provides kits containing any one or more of the elements disclosed in the above methods and compositions. In some embodiments, the kit comprises a vector system as taught herein and instructions for using the kit. Elements may be provided individually or in combinations, and may be provided in any suitable container, such as a vial, a bottle, or a tube. The kits may include the gRNA and the unbound protector strand as described herein. The kits may include the gRNA with the protector strand bound to at least partially to the guide sequence (i.e. pgRNA). Thus the kits may include the pgRNA in the form of a partially double stranded nucleotide sequence as described here. In some embodiments, the kit includes instructions in one or more languages, for example in more than one language. The instructions may be specific to the applications and methods described herein.

[0890] In some embodiments, a kit comprises one or more reagents for use in a process utilizing one or more of the elements described herein. Reagents may be provided in any suitable container. For example, a kit may provide one or more reaction or storage buffers. Reagents may be provided in a form that is usable in a particular assay, or in a form that requires addition of one or more other components before use (e.g., in concentrate or lyophilized form). A buffer can be any buffer, including but not limited to a sodium carbonate buffer, a sodium bicarbonate buffer, a borate buffer, a Tris buffer, a MOPS buffer, a HEPES buffer, and combinations thereof. In some embodiments, the buffer is alkaline. In some embodiments, the buffer has a pH from about 7 to about 10. In some embodiments, the kit comprises one or more oligonucleotides corresponding to a guide sequence for insertion into a vector so as to operably link the guide sequence and a regulatory element. In some embodiments, the kit comprises a homologous recombination template polynucleotide. In some embodiments, the kit comprises one or more of the vectors and/or one or more of the polynucleotides described herein. The kit may advantageously allows to provide all elements of the systems of the invention.

[0891] In one aspect, the invention provides methods for using one or more elements of a CRISPR system. The CRISPR complex of the invention provides an effective means for modifying a target polynucleotide. The CRISPR complex of the invention has a wide variety of utility including modifying (e.g., deleting, inserting, translocating, inactivating, activating) a target polynucleotide in a multiplicity of cell types. As such the CRISPR complex of the invention has a broad spectrum of applications in, e.g., gene therapy, drug screening, disease diagnosis, and prognosis. An exemplary CRISPR complex comprises a CRISPR effector protein complexed with a guide sequence hybridized to a target sequence within the target polynucleotide. In certain embodiments, a direct repeat sequence is linked to the guide sequence.

[0892] In one embodiment, this invention provides a method of cleaving a target polynucleotide. The method comprises modifying a target polynucleotide using a CRISPR complex that binds to the target polynucleotide and effect cleavage of said target polynucleotide. Typically, the CRISPR complex of the invention, when introduced into a cell, creates a break (e.g., a single or a double strand break) in the genome sequence. For example, the method can be used to cleave a disease gene in a cell.

[0893] The break created by the CRISPR complex can be repaired by a repair processes such as the error prone non-homologous end joining (NHEJ) pathway or the high fidelity homology directed repair (HDR). During these repair process, an exogenous polynucleotide template can be introduced into the genome sequence. In some methods, the HDR process is used to modify genome sequence. For example, an exogenous polynucleotide template comprising a sequence to be integrated flanked by an upstream sequence and a downstream sequence is introduced into a cell. The upstream and downstream sequences share sequence similarity with either side of the site of integration in the chromosome.

[0894] Where desired, a donor polynucleotide can be DNA, e.g., a DNA plasmid, a bacterial artificial chromosome (BAC), a yeast artificial chromosome (YAC), a viral vector, a linear piece of DNA, a PCR fragment, a naked nucleic acid, or a nucleic acid complexed with a delivery vehicle such as a liposome or poloxamer.

[0895] The exogenous polynucleotide template comprises a sequence to be integrated (e.g., a mutated gene). The sequence for integration may be a sequence endogenous or exogenous to the cell. Examples of a sequence to be integrated include polynucleotides encoding a protein or a non-coding RNA (e.g., a microRNA). Thus, the sequence for integration may be operably linked to an appropriate control sequence or sequences. Alternatively, the sequence to be integrated may provide a regulatory function.

[0896] The upstream and downstream sequences in the exogenous polynucleotide template are selected to promote recombination between the chromosomal sequence of interest and the donor polynucleotide. The upstream sequence is a nucleic acid sequence that shares sequence similarity with the genome sequence upstream of the targeted site for integration. Similarly, the downstream sequence is a nucleic acid sequence that shares sequence similarity with the chromosomal sequence downstream of the targeted site of integration. The upstream and downstream sequences in the exogenous polynucleotide template can have 75%, 80%, 85%, 90%, 95%, or 100% sequence identity with the targeted genome sequence. Preferably, the upstream and downstream sequences in the exogenous polynucleotide template have about 95%, 96%, 97%, 98%, 99%, or 100% sequence identity with the targeted genome sequence. In some methods, the upstream and downstream sequences in the exogenous polynucleotide template have about 99% or 100% sequence identity with the targeted genome sequence.

[0897] An upstream or downstream sequence may comprise from about 20 bp to about 2500 bp, for example, about 50, 100, 200, 300, 400, 500, 600, 700, 800, 900, 1000, 1100, 1200, 1300, 1400, 1500, 1600, 1700, 1800, 1900, 2000, 2100, 2200, 2300, 2400, or 2500 bp. In some methods, the exemplary upstream or downstream sequence have about 200 bp to about 2000 bp, about 600 bp to about 1000 bp, or more particularly about 700 bp to about 1000 bp.

[0898] In some methods, the exogenous polynucleotide template may further comprise a marker. Such a marker may make it easy to screen for targeted integrations. Examples of suitable markers include restriction sites, fluorescent proteins, or selectable markers. The exogenous polynucleotide template of the invention can be constructed using recombinant techniques (see, for example, Sambrook et al., 2001 and Ausubel et al., 1996).

[0899] In an exemplary method for modifying a target polynucleotide by integrating an exogenous polynucleotide template, a double stranded break is introduced into the genome sequence by the CRISPR complex, the break is repaired via homologous recombination an exogenous polynucleotide template such that the template is integrated into the genome. The presence of a double-stranded break facilitates integration of the template.

[0900] In other embodiments, this invention provides a method of modifying expression of a polynucleotide in a eukaryotic cell. The method comprises increasing or decreasing expression of a target polynucleotide by using a CRISPR complex that binds to the polynucleotide.

[0901] In some methods, a target polynucleotide can be inactivated to effect the modification of the expression in a cell. For example, upon the binding of a CRISPR complex to a target sequence in a cell, the target polynucleotide is inactivated such that the sequence is not transcribed, the coded protein is not produced, or the sequence does not function as the wild-type sequence does. For example, a protein or microRNA coding sequence may be inactivated such that the protein is not produced.

[0902] In some methods, a control sequence can be inactivated such that it no longer functions as a control sequence. As used herein, “control sequence” refers to any nucleic acid sequence that effects the transcription, translation, or accessibility of a nucleic acid sequence. Examples of a control sequence include, a promoter, a transcription terminator, and an enhancer are control sequences. The inactivated target sequence may include a deletion mutation (i.e., deletion of one or more nucleotides), an insertion mutation (i.e., insertion of one or more nucleotides), or a nonsense mutation (i.e., substitution of a single nucleotide for another nucleotide such that a stop codon is introduced). In some methods, the inactivation of a target sequence results in “knockout” of the target sequence.

### Exemplary Methods of Using of CRISPR Cas System

[0903] The invention provides a non-naturally occurring or engineered composition, or one or more polynucleotides encoding components of said composition, or vector or delivery systems comprising one or more polynucleotides encoding components of said composition for use in a modifying a target cell in vivo, ex vivo or in vitro and, may be conducted in a manner alters the cell such that once modified the progeny or cell line of the CRISPR modified cell retains the altered phenotype. The modified cells and progeny may be part of a multi-cellular organism such as a plant or animal with ex vivo or in vivo application of CRISPR system to desired cell types. The CRISPR invention may be a therapeutic method of treatment. The therapeutic method of treatment may comprise gene or genome editing, or gene therapy.

### Use of Inactivated CRISPR Cpf1 Enzyme for Detection Methods Such as FISH

[0904] In one aspect, the invention provides an engineered, non-naturally occurring CRISPR-Cas system comprising a catalytically inactivate Cas protein described herein, preferably an inactivate Cpf1 (dCpf1), and use this system in detection methods such as fluorescence in situ hybridization (FISH). dCpf1 which lacks the ability to produce DNA double-strand breaks may be fused with a marker, such as fluorescent protein, such as the enhanced green fluorescent protein (eEGFP) and co-expressed with small guide RNAs to target pericentric, centric and teleomeric repeats in vivo. The dCpf1 system can be used to visualize both repetitive sequences and individual genes in the human genome. Such new applications of labelled dCpf1 CRISPR-cas systems may be important in imaging cells and studying the functional nuclear architecture, especially in cases with a small nucleus volume or complex 3-D structures. (Chen B, Gilbert L A, Cimini B A, Schnitzbauer J, Zhang W, Li G W, Park J, Blackburn E H, Weissman J S, Qi L S, Huang B. 2013. Dynamic imaging of genomic loci in living human cells by an optimized CRISPR/Cas system. Cell 155(7):1479-91. doi: 10.1016/j.cell.2013.12.001.)

Modifying a Target with CRISPR Cas System or Complex (e.g., Cpf1-RNA Complex)

[0905] In one aspect, the invention provides for methods of modifying a target polynucleotide in a eukaryotic cell, which may be in vivo, ex vivo or in vitro. In some embodiments, the method comprises sampling a cell or population of cells from a human or non-human animal, and modifying the cell or cells. Culturing may occur at any stage ex vivo. The cell or cells may even be re-introduced into the non-human animal or plant. For re-introduced cells it is particularly preferred that the cells are stem cells.

[0906] In some embodiments, the method comprises allowing a CRISPR complex to bind to the target polynucleotide to effect cleavage of said target polynucleotide thereby modifying the target polynucleotide, wherein the CRISPR complex comprises a CRISPR enzyme complexed with a guide sequence hybridized or hybridizable to a target sequence within said target polynucleotide.

[0907] In one aspect, the invention provides a method of modifying expression of a polynucleotide in a eukaryotic cell. In some embodiments, the method comprises allowing a CRISPR complex to bind to the polynucleotide such that said binding results in increased or decreased expression of said polynucleotide; wherein the CRISPR complex comprises a CRISPR enzyme complexed with a guide sequence hybridized or hybridizable to a target sequence within said polynucleotide. Similar considerations and conditions apply as above for methods of modifying a target polynucleotide. In fact, these sampling, culturing and re-introduction options apply across the aspects of the present invention.

[0908] Indeed, in any aspect of the invention, the CRISPR complex may comprise a CRISPR enzyme complexed with a guide sequence hybridized or hybridizable to a target sequence. Similar considerations and conditions apply as above for methods of modifying a target polynucleotide.

[0909] Thus in any of the non-naturally-occurring CRISPR enzymes described herein comprise at least one modification and whereby the enzyme has certain improved capabilities. In particular, any of the enzymes are capable of forming a CRISPR complex with a guide RNA. When such a complex forms, the guide RNA is capable of binding to a target polynucleotide sequence and the enzyme is capable of modifying a target locus. In addition, the enzyme in the CRISPR complex has reduced capability of modifying one or more off-target loci as compared to an unmodified enzyme.

[0910] In addition, the modified CRISPR enzymes described herein encompass enzymes whereby in the CRISPR complex the enzyme has increased capability of modifying the one or more target loci as compared to an unmodified enzyme. Such function may be provided separate to or provided in combination with the above-described function of reduced capability of modifying one or more off-target loci. Any such enzymes may be provided with any of the further modifications to the CRISPR enzyme as described herein, such as in combination with any activity provided by one or more associated heterologous functional domains, any further mutations to reduce nuclease activity and the like.

[0911] In advantageous embodiments of the invention, the modified CRISPR enzyme is provided with reduced capability of modifying one or more off-target loci as compared to an unmodified enzyme and increased capability of modifying the one or more target loci as compared to an unmodified enzyme. In combination with further modifications to the enzyme, significantly enhanced specificity may be achieved. For example, combination of such advantageous embodiments with one or more additional mutations is provided wherein the one or more additional mutations are in one or more catalytically active domains. Such further catalytic mutations may confer nickase functionality as described in detail elsewhere herein. In such enzymes, enhanced specificity may be achieved due to an improved specificity in terms of enzyme activity.

[0912] Modifications to reduce off-target effects and/or enhance on-target effects as described above may be made to amino acid residues located in a positively-charged region/groove situated between the RuvC-III and HNH domains. It will be appreciated that any of the functional effects described above may be achieved by modification of amino acids within the aforementioned groove but also by modification of amino acids adjacent to or outside of that groove.

[0913] Additional functionalities which may be engineered into modified CRISPR enzymes as described herein include the following. 1. modified CRISPR enzymes that disrupt DNA:protein interactions without affecting protein tertiary or secondary structure. This includes residues that contact any part of the RNA:DNA duplex. 2. modified CRISPR enzymes that weaken intra-protein interactions holding Cpf1 in conformation essential for nuclease cutting in response to DNA binding (on or off target). For example: a modification that mildly inhibits, but still allows, the nuclease conformation of the HNH domain (positioned at the scissile phosphate). 3. modified CRISPR enzymes that strengthen intra-protein interactions holding Cpf1 in a conformation inhibiting nuclease activity in response to DNA binding (on or off targets). For example: a modification that stabilizes the HNH domain in a conformation away from the scissile phosphate. Any such additional functional enhancement may be provided in combination with any other modification to the CRISPR enzyme as described in detail elsewhere herein.

[0914] Any of the herein described improved functionalities may be made to any CRISPR enzyme, such as a Cpf1 enzyme. However, it will be appreciated that any of the functionalities described herein may be engineered into Cpf1 enzymes from other orthologs, including chimeric enzymes comprising fragments from multiple orthologs.

### Nucleic Acids, Amino Acids and Proteins, Regulatory Sequences, Vectors, Etc.

[0915] The invention uses nucleic acids to bind target DNA sequences. This is advantageous as nucleic acids are much easier and cheaper to produce than proteins, and the specificity can be varied according to the length of the stretch where homology is sought. Complex 3-D positioning of multiple fingers, for example is not required. The terms “polynucleotide”, “nucleotide”, “nucleotide sequence”, “nucleic acid” and “oligonucleotide” are used interchangeably. They refer to a polymeric form of nucleotides of any length, either deoxyribonucleotides or ribonucleotides, or analogs thereof. Polynucleotides may have any three dimensional structure, and may perform any function, known or unknown. The following are non-limiting examples of polynucleotides: coding or non-coding regions of a gene or gene fragment, loci (locus) defined from linkage analysis, exons, introns, messenger RNA (mRNA), transfer RNA, ribosomal RNA, short interfering RNA (siRNA), short-hairpin RNA (shRNA), micro-RNA (miRNA), ribozymes, cDNA, recombinant polynucleotides, branched polynucleotides, plasmids, vectors, isolated DNA of any sequence, isolated RNA of any sequence, nucleic acid probes, and primers. The term also encompasses nucleic-acid-like structures with synthetic backbones, see, e.g., Eckstein, 1991; Baserga et al., 1992; Milligan, 1993; WO 97/03211; WO 96/39154; Mata, 1997; Strauss-Soukup, 1997; and Samstag, 1996. A polynucleotide may comprise one or more modified nucleotides, such as methylated nucleotides and nucleotide analogs. If present, modifications to the nucleotide structure may be imparted before or after assembly of the polymer. The sequence of nucleotides may be interrupted by non-nucleotide components. A polynucleotide may be further modified after polymerization, such as by conjugation with a labeling component. As used herein the term “wild type” is a term of the art understood by skilled persons and means the typical form of an organism, strain, gene or characteristic as it occurs in nature as distinguished from mutant or variant forms. A “wild type” can be a base line. As used herein the term “variant” should be taken to mean the exhibition of qualities that have a pattern that deviates from what occurs in nature. The terms “non-naturally occurring” or “engineered” are used interchangeably and indicate the involvement of the hand of man. The terms, when referring to nucleic acid molecules or polypeptides mean that the nucleic acid molecule or the polypeptide is at least substantially free from at least one other component with which they are naturally associated in nature and as found in nature. “Complementarity” refers to the ability of a nucleic acid to form hydrogen bond(s) with another nucleic acid sequence by either traditional Watson-Crick base pairing or other non-traditional types. A percent complementarity indicates the percentage of residues in a nucleic acid molecule which can form hydrogen bonds (e.g., Watson-Crick base pairing) with a second nucleic acid sequence (e.g., 5, 6, 7, 8, 9, 10 out of 10 being 50%, 60%, 70%, 80%, 90%, and 100% complementary). “Perfectly complementary” means that all the contiguous residues of a nucleic acid sequence will hydrogen bond with the same number of contiguous residues in a second nucleic acid sequence. “Substantially complementary” as used herein refers to a degree of complementarity that is at least 60%, 65%, 70%, 75%, 80%, 85%, 90%, 95%, 97%, 98%, 99%, or 100% over a region of 8, 9, 10, 11, 12, 13, 14, 15, 16, 17, 18, 19, 20, 21, 22, 23, 24, 25, 30, 35, 40, 45, 50, or more nucleotides, or refers to two nucleic acids that hybridize under stringent conditions. As used herein, “stringent conditions” for hybridization refer to conditions under which a nucleic acid having complementarity to a target sequence predominantly hybridizes with the target sequence, and substantially does not hybridize to non-target sequences. Stringent conditions are generally sequence-dependent, and vary depending on a number of factors. In general, the longer the sequence, the higher the temperature at which the sequence specifically hybridizes to its target sequence. Non-limiting examples of stringent conditions are described in detail in Tijssen (1993), Laboratory Techniques In Biochemistry And Molecular Biology-Hybridization With Nucleic Acid Probes Part I, Second Chapter “Overview of principles of hybridization and the strategy of nucleic acid probe assay”, Elsevier, N.Y. Where reference is made to a polynucleotide sequence, then complementary or partially complementary sequences are also envisaged. These are preferably capable of hybridising to the reference sequence under highly stringent conditions. Generally, in order to maximize the hybridization rate, relatively low-stringency hybridization conditions are selected: about 20 to 25° C. lower than the thermal melting point (Tₘ). The Tₘ is the temperature at which 50% of specific target sequence hybridizes to a perfectly complementary probe in solution at a defined ionic strength and pH. Generally, in order to require at least about 85% nucleotide complementarity of hybridized sequences, highly stringent washing conditions are selected to be about 5 to 15° C. lower than the Tₘ. In order to require at least about 70% nucleotide complementarity of hybridized sequences, moderately-stringent washing conditions are selected to be about 15 to 30° C. lower than the Tₘ. Highly permissive (very low stringency) washing conditions may be as low as 50° C. below the Tₘ, allowing a high level of mis-matching between hybridized sequences. Those skilled in the art will recognize that other physical and chemical parameters in the hybridization and wash stages can also be altered to affect the outcome of a detectable hybridization signal from a specific level of homology between target and probe sequences. Preferred highly stringent conditions comprise incubation in 50% formamide, 5×SSC, and 1% SDS at 42° C., or incubation in 5×SSC and 1% SDS at 65° C., with wash in 0.2×SSC and 0.1% SDS at 65° C. “Hybridization” refers to a reaction in which one or more polynucleotides react to form a complex that is stabilized via hydrogen bonding between the bases of the nucleotide residues. The hydrogen bonding may occur by Watson Crick base pairing, Hoogstein binding, or in any other sequence specific manner. The complex may comprise two strands forming a duplex structure, three or more strands forming a multi stranded complex, a single self-hybridizing strand, or any combination of these. A hybridization reaction may constitute a step in a more extensive process, such as the initiation of PCR, or the cleavage of a polynucleotide by an enzyme. A sequence capable of hybridizing with a given sequence is referred to as the “complement” of the given sequence. As used herein, the term “genomic locus” or “locus” (plural loci) is the specific location of a gene or DNA sequence on a chromosome. A “gene” refers to stretches of DNA or RNA that encode a polypeptide or an RNA chain that has functional role to play in an organism and hence is the molecular unit of heredity in living organisms. For the purpose of this invention it may be considered that genes include regions which regulate the production of the gene product, whether or not such regulatory sequences are adjacent to coding and/or transcribed sequences. Accordingly, a gene includes, but is not necessarily limited to, promoter sequences, terminators, translational regulatory sequences such as ribosome binding sites and internal ribosome entry sites, enhancers, silencers, insulators, boundary elements, replication origins, matrix attachment sites and locus control regions. As used herein, “expression of a genomic locus” or “gene expression” is the process by which information from a gene is used in the synthesis of a functional gene product. The products of gene expression are often proteins, but in non-protein coding genes such as rRNA genes or tRNA genes, the product is functional RNA. The process of gene expression is used by all known life—eukaryotes (including multicellular organisms), prokaryotes (bacteria and archaea) and viruses to generate functional products to survive. As used herein “expression” of a gene or nucleic acid encompasses not only cellular gene expression, but also the transcription and translation of nucleic acid(s) in cloning systems and in any other context. As used herein, “expression” also refers to the process by which a polynucleotide is transcribed from a DNA template (such as into and mRNA or other RNA transcript) and/or the process by which a transcribed mRNA is subsequently translated into peptides, polypeptides, or proteins. Transcripts and encoded polypeptides may be collectively referred to as “gene product.” If the polynucleotide is derived from genomic DNA, expression may include splicing of the mRNA in a eukaryotic cell. The terms “polypeptide”, “peptide” and “protein” are used interchangeably herein to refer to polymers of amino acids of any length. The polymer may be linear or branched, it may comprise modified amino acids, and it may be interrupted by non amino acids. The terms also encompass an amino acid polymer that has been modified; for example, disulfide bond formation, glycosylation, lipidation, acetylation, phosphorylation, or any other manipulation, such as conjugation with a labeling component. As used herein the term “amino acid” includes natural and/or unnatural or synthetic amino acids, including glycine and both the D or L optical isomers, and amino acid analogs and peptidomimetics. As used herein, the term “domain” or “protein domain” refers to a part of a protein sequence that may exist and function independently of the rest of the protein chain. As described in aspects of the invention, sequence identity is related to sequence homology. Homology comparisons may be conducted by eye, or more usually, with the aid of readily available sequence comparison programs. These commercially available computer programs may calculate percent (%) homology between two or more sequences and may also calculate the sequence identity shared by two or more amino acid or nucleic acid sequences.

[0916] In aspects of the invention the term “guide RNA”, refers to the polynucleotide sequence comprising a putative or identified crRNA sequence or guide sequence.

[0917] As used herein the term “wild type” is a term of the art understood by skilled persons and means the typical form of an organism, strain, gene or characteristic as it occurs in nature as distinguished from mutant or variant forms. A “wild type” can be a base line.

[0918] As used herein the term “variant” should be taken to mean the exhibition of qualities that have a pattern that deviates from what occurs in nature.

[0919] The terms “non-naturally occurring” or “engineered” are used interchangeably and indicate the involvement of the hand of man. The terms, when referring to nucleic acid molecules or polypeptides mean that the nucleic acid molecule or the polypeptide is at least substantially free from at least one other component with which they are naturally associated in nature and as found in nature. In all aspects and embodiments, whether they include these terms or not, it will be understood that, preferably, the may be optional and thus preferably included or not preferably not included. Furthermore, the terms “non-naturally occurring” and “engineered” may be used interchangeably and so can therefore be used alone or in combination and one or other may replace mention of both together. In particular, “engineered” is preferred in place of “non-naturally occurring” or “non-naturally occurring and/or engineered.”

[0920] Sequence homologies may be generated by any of a number of computer programs known in the art, for example BLAST or FASTA, etc. A suitable computer program for carrying out such an alignment is the GCG Wisconsin Bestfit package (University of Wisconsin, U.S.A; Devereux et al., 1984, Nucleic Acids Research 12:387). Examples of other software than may perform sequence comparisons include, but are not limited to, the BLAST package (see Ausubel et al., 1999 ibid—Chapter 18), FASTA (Atschul et al., 1990, J. Mol. Biol., 403-410) and the GENEWORKS suite of comparison tools. Both BLAST and FASTA are available for offline and online searching (see Ausubel et al., 1999 ibid, pages 7-58 to 7-60). However it is preferred to use the GCG Bestfit program. Percentage (%) sequence homology may be calculated over contiguous sequences, i.e., one sequence is aligned with the other sequence and each amino acid or nucleotide in one sequence is directly compared with the corresponding amino acid or nucleotide in the other sequence, one residue at a time. This is called an “ungapped” alignment. Typically, such ungapped alignments are performed only over a relatively short number of residues. Although this is a very simple and consistent method, it fails to take into consideration that, for example, in an otherwise identical pair of sequences, one insertion or deletion may cause the following amino acid residues to be put out of alignment, thus potentially resulting in a large reduction in % homology when a global alignment is performed. Consequently, most sequence comparison methods are designed to produce optimal alignments that take into consideration possible insertions and deletions without unduly penalizing the overall homology or identity score. This is achieved by inserting “gaps” in the sequence alignment to try to maximize local homology or identity. However, these more complex methods assign “gap penalties” to each gap that occurs in the alignment so that, for the same number of identical amino acids, a sequence alignment with as few gaps as possible—reflecting higher relatedness between the two compared sequences—may achieve a higher score than one with many gaps. “Affinity gap costs” are typically used that charge a relatively high cost for the existence of a gap and a smaller penalty for each subsequent residue in the gap. This is the most commonly used gap scoring system. High gap penalties may, of course, produce optimized alignments with fewer gaps. Most alignment programs allow the gap penalties to be modified. However, it is preferred to use the default values when using such software for sequence comparisons. For example, when using the GCG Wisconsin Bestfit package the default gap penalty for amino acid sequences is −12 for a gap and −4 for each extension. Calculation of maximum % homology therefore first requires the production of an optimal alignment, taking into consideration gap penalties. A suitable computer program for carrying out such an alignment is the GCG Wisconsin Bestfit package (Devereux et al., 1984 Nuc. Acids Research 12 p 387). Examples of other software than may perform sequence comparisons include, but are not limited to, the BLAST package (see Ausubel et al., 1999 Short Protocols in Molecular Biology, 4^{th} Ed. —Chapter 18), FASTA (Altschul et al., 1990 J. Mol. Biol. 403-410) and the GENEWORKS suite of comparison tools. Both BLAST and FASTA are available for offline and online searching (see Ausubel et al., 1999, Short Protocols in Molecular Biology, pages 7-58 to 7-60). However, for some applications, it is preferred to use the GCG Bestfit program. A new tool, called BLAST 2 Sequences is also available for comparing protein and nucleotide sequences (see FEMS Microbiol Lett. 1999 174(2): 247-50; FEMS Microbiol Lett. 1999 177(1): 187-8 and the website of the National Center for Biotechnology information at the website of the National Institutes for Health). Although the final % homology may be measured in terms of identity, the alignment process itself is typically not based on an all-or-nothing pair comparison. Instead, a scaled similarity score matrix is generally used that assigns scores to each pair-wise comparison based on chemical similarity or evolutionary distance. An example of such a matrix commonly used is the BLOSUM62 matrix—the default matrix for the BLAST suite of programs. GCG Wisconsin programs generally use either the public default values or a custom symbol comparison table, if supplied (see user manual for further details). For some applications, it is preferred to use the public default values for the GCG package, or in the case of other software, the default matrix, such as BLOSUM62. Alternatively, percentage homologies may be calculated using the multiple alignment feature in DNASIS™ (Hitachi Software), based on an algorithm, analogous to CLUSTAL (Higgins D G & Sharp P M (1988), Gene 73(1), 237-244). Once the software has produced an optimal alignment, it is possible to calculate % homology, preferably % sequence identity. The software typically does this as part of the sequence comparison and generates a numerical result. The sequences may also have deletions, insertions or substitutions of amino acid residues which produce a silent change and result in a functionally equivalent substance. Deliberate amino acid substitutions may be made on the basis of similarity in amino acid properties (such as polarity, charge, solubility, hydrophobicity, hydrophilicity, and/or the amphipathic nature of the residues) and it is therefore useful to group amino acids together in functional groups. Amino acids may be grouped together based on the properties of their side chains alone. However, it is more useful to include mutation data as well. The sets of amino acids thus derived are likely to be conserved for structural reasons. These sets may be described in the form of a Venn diagram (Livingstone C. D. and Barton G. J. (1993) “Protein sequence alignments: a strategy for the hierarchical analysis of residue conservation” Comput. Appl. Biosci. 9: 745-756) (Taylor W. R. (1986) “The classification of amino acid conservation” J. Theor. Biol. 119; 205-218). Conservative substitutions may be made, for example according to the table below which describes a generally accepted Venn diagram grouping of amino acids.

| Set | | Sub-set | |
|---|---|---|---|
| Hydro- | FWYHKMILVAGC | Aromatic | FWYH |
| phobic | | Aliphatic | ILV |
| Polar | WYHKREDCSTNQ | Charged | HKRED |
| | | Positively charged | HKR |
| | | Negatively charged | ED |
| Small | VCAGSPTND | Tiny | AGS |

[0921] The terms “subject,” “individual,” and “patient” are used interchangeably herein to refer to a vertebrate, preferably a mammal, more preferably a human. Mammals include, but are not limited to, murines, simians, humans, farm animals, sport animals, and pets. Tissues, cells and their progeny of a biological entity obtained in vivo or cultured in vitro are also encompassed.

[0922] The terms “therapeutic agent”, “therapeutic capable agent” or “treatment agent” are used interchangeably and refer to a molecule or compound that confers some beneficial effect upon administration to a subject. The beneficial effect includes enablement of diagnostic determinations; amelioration of a disease, symptom, disorder, or pathological condition; reducing or preventing the onset of a disease, symptom, disorder or condition; and generally counteracting a disease, symptom, disorder or pathological condition.

[0923] As used herein, “treatment” or “treating,” or “palliating” or “ameliorating” are used interchangeably. These terms refer to an approach for obtaining beneficial or desired results including but not limited to a therapeutic benefit and/or a prophylactic benefit. By therapeutic benefit is meant any therapeutically relevant improvement in or effect on one or more diseases, conditions, or symptoms under treatment. For prophylactic benefit, the compositions may be administered to a subject at risk of developing a particular disease, condition, or symptom, or to a subject reporting one or more of the physiological symptoms of a disease, even though the disease, condition, or symptom may not have yet been manifested.

[0924] The term “effective amount” or “therapeutically effective amount” refers to the amount of an agent that is sufficient to effect beneficial or desired results. The therapeutically effective amount may vary depending upon one or more of: the subject and disease condition being treated, the weight and age of the subject, the severity of the disease condition, the manner of administration and the like, which can readily be determined by one of ordinary skill in the art. The term also applies to a dose that will provide an image for detection by any one of the imaging methods described herein. The specific dose may vary depending on one or more of: the particular agent chosen, the dosing regimen to be followed, whether it is administered in combination with other compounds, timing of administration, the tissue to be imaged, and the physical delivery system in which it is carried.

[0925] Several aspects of the invention relate to vector systems comprising one or more vectors, or vectors as such. Vectors can be designed for expression of CRISPR transcripts (e.g. nucleic acid transcripts, proteins, or enzymes) in prokaryotic or eukaryotic cells. For example, CRISPR transcripts can be expressed in bacterial cells such as Escherichia coli, insect cells (using baculovirus expression vectors), yeast cells, or mammalian cells. Suitable host cells are discussed further in Goeddel, GENE EXPRESSION TECHNOLOGY: METHODS IN ENZYMOLOGY 185, Academic Press, San Diego, Calif. (1990). Alternatively, the recombinant expression vector can be transcribed and translated in vitro, for example using T7 promoter regulatory sequences and T7 polymerase.

[0926] Embodiments of the invention include sequences (both polynucleotide or polypeptide) which may comprise homologous substitution (substitution and replacement are both used herein to mean the interchange of an existing amino acid residue or nucleotide, with an alternative residue or nucleotide) that may occur i.e., like-for-like substitution in the case of amino acids such as basic for basic, acidic for acidic, polar for polar, etc. Non-homologous substitution may also occur i.e., from one class of residue to another or alternatively involving the inclusion of unnatural amino acids such as ornithine (hereinafter referred to as Z), diaminobutyric acid ornithine (hereinafter referred to as B), norleucine ornithine (hereinafter referred to as O), pyriylalanine, thienylalanine, naphthylalanine and phenylglycine. Variant amino acid sequences may include suitable spacer groups that may be inserted between any two amino acid residues of the sequence including alkyl groups such as methyl, ethyl or propyl groups in addition to amino acid spacers such as glycine or β-alanine residues. A further form of variation, which involves the presence of one or more amino acid residues in peptoid form, may be well understood by those skilled in the art. For the avoidance of doubt, “the peptoid form” is used to refer to variant amino acid residues wherein the α-carbon substituent group is on the residue's nitrogen atom rather than the α-carbon. Processes for preparing peptides in the peptoid form are known in the art, for example Simon R J et al., PNAS (1992) 89(20), 9367-9371 and Horwell D C, Trends Biotechnol. (1995) 13(4), 132-134.

[0927] Homology modelling: Corresponding residues in other Cpf1 orthologs can be identified by the methods of Zhang et al., 2012 (Nature; 490(7421): 556-60) and Chen et al., 2015 (PLoS Comput Biol; 11(5): e1004248)—a computational protein-protein interaction (PPI) method to predict interactions mediated by domain-motif interfaces. PrePPI (Predicting PPI), a structure based PPI prediction method, combines structural evidence with non-structural evidence using a Bayesian statistical framework. The method involves taking a pair a query proteins and using structural alignment to identify structural representatives that correspond to either their experimentally determined structures or homology models. Structural alignment is further used to identify both close and remote structural neighbours by considering global and local geometric relationships. Whenever two neighbors of the structural representatives form a complex reported in the Protein Data Bank, this defines a template for modelling the interaction between the two query proteins. Models of the complex are created by superimposing the representative structures on their corresponding structural neighbour in the template. This approach is further described in Dey et al., 2013 (Prot Sci; 22: 359-66).

[0928] For purpose of this invention, amplification means any method employing a primer and a polymerase capable of replicating a target sequence with reasonable fidelity. Amplification may be carried out by natural or recombinant DNA polymerases such as TaqGold™, T7 DNA polymerase, Klenow fragment of E. coli DNA polymerase, and reverse transcriptase. A preferred amplification method is PCR.

[0929] In certain aspects the invention involves vectors. A used herein, a “vector” is a tool that allows or facilitates the transfer of an entity from one environment to another. It is a replicon, such as a plasmid, phage, or cosmid, into which another DNA segment may be inserted so as to bring about the replication of the inserted segment. Generally, a vector is capable of replication when associated with the proper control elements. In general, the term “vector” refers to a nucleic acid molecule capable of transporting another nucleic acid to which it has been linked. Vectors include, but are not limited to, nucleic acid molecules that are single-stranded, double-stranded, or partially double-stranded; nucleic acid molecules that comprise one or more free ends, no free ends (e.g. circular); nucleic acid molecules that comprise DNA, RNA, or both; and other varieties of polynucleotides known in the art. One type of vector is a “plasmid,” which refers to a circular double stranded DNA loop into which additional DNA segments can be inserted, such as by standard molecular cloning techniques. Another type of vector is a viral vector, wherein virally-derived DNA or RNA sequences are present in the vector for packaging into a virus (e.g. retroviruses, replication defective retroviruses, adenoviruses, replication defective adenoviruses, and adeno-associated viruses (AAVs)). Viral vectors also include polynucleotides carried by a virus for transfection into a host cell. Certain vectors are capable of autonomous replication in a host cell into which they are introduced (e.g. bacterial vectors having a bacterial origin of replication and episomal mammalian vectors). Other vectors (e.g., non-episomal mammalian vectors) are integrated into the genome of a host cell upon introduction into the host cell, and thereby are replicated along with the host genome. Moreover, certain vectors are capable of directing the expression of genes to which they are operatively-linked. Such vectors are referred to herein as “expression vectors.” Common expression vectors of utility in recombinant DNA techniques are often in the form of plasmids.

[0930] Recombinant expression vectors can comprise a nucleic acid of the invention in a form suitable for expression of the nucleic acid in a host cell, which means that the recombinant expression vectors include one or more regulatory elements, which may be selected on the basis of the host cells to be used for expression, that is operatively-linked to the nucleic acid sequence to be expressed. Within a recombinant expression vector, “operably linked” is intended to mean that the nucleotide sequence of interest is linked to the regulatory element(s) in a manner that allows for expression of the nucleotide sequence (e.g. in an in vitro transcription/translation system or in a host cell when the vector is introduced into the host cell). With regards to recombination and cloning methods, mention is made of U.S. patent application Ser. No. 10/815,730, published Sep. 2, 2004 as US 2004-0171156 A1, the contents of which are herein incorporated by reference in their entirety.

[0931] Aspects of the invention relate to bicistronic vectors for guide RNA and (optionally modified or mutated) CRISPR enzymes (e.g. Cpf1). Bicistronic expression vectors for guide RNA and (optionally modified or mutated) CRISPR enzymes are preferred. In general and particularly in this embodiment (optionally modified or mutated) CRISPR enzymes are preferably driven by the CBh promoter. The RNA may preferably be driven by a Pol III promoter, such as a U6 promoter. Ideally the two are combined.

[0932] In some embodiments, a loop in the guide RNA is provided. This may be a stem loop or a tetra loop. The loop is preferably GAAA, but it is not limited to this sequence or indeed to being only 4 bp in length. Indeed, preferred loop forming sequences for use in hairpin structures are four nucleotides in length, and most preferably have the sequence GAAA. However, longer or shorter loop sequences may be used, as may alternative sequences. The sequences preferably include a nucleotide triplet (for example, AAA), and an additional nucleotide (for example C or G). Examples of loop forming sequences include CAAA and AAAG. In practicing any of the methods disclosed herein, a suitable vector can be introduced to a cell or an embryo via one or more methods known in the art, including without limitation, microinjection, electroporation, sonoporation, biolistics, calcium phosphate-mediated transfection, cationic transfection, liposome transfection, dendrimer transfection, heat shock transfection, nucleofection transfection, magnetofection, lipofection, impalefection, optical transfection, proprietary agent-enhanced uptake of nucleic acids, and delivery via liposomes, immunoliposomes, virosomes, or artificial virions. In some methods, the vector is introduced into an embryo by microinjection. The vector or vectors may be microinjected into the nucleus or the cytoplasm of the embryo. In some methods, the vector or vectors may be introduced into a cell by nucleofection.

[0933] The term “regulatory element” is intended to include promoters, enhancers, internal ribosomal entry sites (IRES), and other expression control elements (e.g. transcription termination signals, such as polyadenylation signals and poly-U sequences). Such regulatory elements are described, for example, in Goeddel, GENE EXPRESSION TECHNOLOGY: METHODS IN ENZYMOLOGY 185, Academic Press, San Diego, Calif. (1990). Regulatory elements include those that direct constitutive expression of a nucleotide sequence in many types of host cell and those that direct expression of the nucleotide sequence only in certain host cells (e.g., tissue-specific regulatory sequences). A tissue-specific promoter may direct expression primarily in a desired tissue of interest, such as muscle, neuron, bone, skin, blood, specific organs (e.g. liver, pancreas), or particular cell types (e.g. lymphocytes). Regulatory elements may also direct expression in a temporal-dependent manner, such as in a cell-cycle dependent or developmental stage-dependent manner, which may or may not also be tissue or cell-type specific. In some embodiments, a vector comprises one or more pol III promoter (e.g. 1, 2, 3, 4, 5, or more pol III promoters), one or more pol II promoters (e.g. 1, 2, 3, 4, 5, or more pol II promoters), one or more pol I promoters (e.g. 1, 2, 3, 4, 5, or more pol I promoters), or combinations thereof. Examples of pol III promoters include, but are not limited to, U6 and H1 promoters. Examples of pol II promoters include, but are not limited to, the retroviral Rous sarcoma virus (RSV) LTR promoter (optionally with the RSV enhancer), the cytomegalovirus (CMV) promoter (optionally with the CMV enhancer) [see, e.g., Boshart et al, Cell, 41:521-530 (1985)], the SV40 promoter, the dihydrofolate reductase promoter, the β-actin promoter, the phosphoglycerol kinase (PGK) promoter, and the EF1α promoter. Also encompassed by the term “regulatory element” are enhancer elements, such as WPRE; CMV enhancers; the R-U5′ segment in LTR of HTLV-I (Mol. Cell. Biol., Vol. 8(1), p. 466-472, 1988); SV40 enhancer; and the intron sequence between exons 2 and 3 of rabbit β-globin (Proc. Natl. Acad. Sci. USA., Vol. 78(3), p. 1527-31, 1981). It will be appreciated by those skilled in the art that the design of the expression vector can depend on such factors as the choice of the host cell to be transformed, the level of expression desired, etc. A vector can be introduced into host cells to thereby produce transcripts, proteins, or peptides, including fusion proteins or peptides, encoded by nucleic acids as described herein (e.g., clustered regularly interspersed short palindromic repeats (CRISPR) transcripts, proteins, enzymes, mutant forms thereof, fusion proteins thereof, etc.). With regards to regulatory sequences, mention is made of U.S. patent application Ser. No. 10/491,026, the contents of which are incorporated by reference herein in their entirety. With regards to promoters, mention is made of PCT publication WO 2011/028929 and U.S. application Ser. No. 12/511,940, the contents of which are incorporated by reference herein in their entirety.

[0934] Vectors can be designed for expression of CRISPR transcripts (e.g. nucleic acid transcripts, proteins, or enzymes) in prokaryotic or eukaryotic cells. For example, CRISPR transcripts can be expressed in bacterial cells such as Escherichia coli, insect cells (using baculovirus expression vectors), yeast cells, or mammalian cells. Suitable host cells are discussed further in Goeddel, GENE EXPRESSION TECHNOLOGY: METHODS IN ENZYMOLOGY 185, Academic Press, San Diego, Calif. (1990). Alternatively, the recombinant expression vector can be transcribed and translated in vitro, for example using T7 promoter regulatory sequences and T7 polymerase.

[0935] Vectors may be introduced and propagated in a prokaryote or prokaryotic cell. In some embodiments, a prokaryote is used to amplify copies of a vector to be introduced into a eukaryotic cell or as an intermediate vector in the production of a vector to be introduced into a eukaryotic cell (e.g. amplifying a plasmid as part of a viral vector packaging system). In some embodiments, a prokaryote is used to amplify copies of a vector and express one or more nucleic acids, such as to provide a source of one or more proteins for delivery to a host cell or host organism. Expression of proteins in prokaryotes is most often carried out in Escherichia coli with vectors containing constitutive or inducible promoters directing the expression of either fusion or non-fusion proteins. Fusion vectors add a number of amino acids to a protein encoded therein, such as to the amino terminus of the recombinant protein. Such fusion vectors may serve one or more purposes, such as: (i) to increase expression of recombinant protein; (ii) to increase the solubility of the recombinant protein; and (iii) to aid in the purification of the recombinant protein by acting as a ligand in affinity purification. Often, in fusion expression vectors, a proteolytic cleavage site is introduced at the junction of the fusion moiety and the recombinant protein to enable separation of the recombinant protein from the fusion moiety subsequent to purification of the fusion protein. Such enzymes, and their cognate recognition sequences, include Factor Xa, thrombin and enterokinase. Example fusion expression vectors include pGEX (Pharmacia Biotech Inc; Smith and Johnson, 1988. Gene 67: 31-40), pMAL (New England Biolabs, Beverly, Mass.) and pRIT5 (Pharmacia, Piscataway, N.J.) that fuse glutathione S-transferase (GST), maltose E binding protein, or protein A, respectively, to the target recombinant protein. Examples of suitable inducible non-fusion E. coli expression vectors include pTrc (Amrann et al., (1988) Gene 69:301-315) and pET 11d (Studier et al., GENE EXPRESSION TECHNOLOGY: METHODS IN ENZYMOLOGY 185, Academic Press, San Diego, Calif. (1990) 60-89). In some embodiments, a vector is a yeast expression vector. Examples of vectors for expression in yeast Saccharomyces cerivisae include pYepSec1 (Baldari, et al., 1987. EMBO J. 6: 229-234), pMFa (Kuijan and Herskowitz, 1982. Cell 30: 933-943), pJRY88 (Schultz et al., 1987. Gene 54: 113-123), pYES2 (Invitrogen Corporation, San Diego, Calif.), and picZ (InVitrogen Corp, San Diego, Calif.). In some embodiments, a vector drives protein expression in insect cells using baculovirus expression vectors. Baculovirus vectors available for expression of proteins in cultured insect cells (e.g., SF9 cells) include the pAc series (Smith, et al., 1983. Mol. Cell. Biol. 3: 2156-2165) and the pVL series (Lucklow and Summers, 1989. Virology 170: 31-39).

[0936] In some embodiments, a vector is capable of driving expression of one or more sequences in mammalian cells using a mammalian expression vector. Examples of mammalian expression vectors include pCDM8 (Seed, 1987. Nature 329: 840) and pMT2PC (Kaufman, et al., 1987. EMBO J. 6: 187-195). When used in mammalian cells, the expression vector's control functions are typically provided by one or more regulatory elements. For example, commonly used promoters are derived from polyoma, adenovirus 2, cytomegalovirus, simian virus 40, and others disclosed herein and known in the art. For other suitable expression systems for both prokaryotic and eukaryotic cells see, e.g., Chapters 16 and 17 of Sambrook, et al., MOLECULAR CLONING: A LABORATORY MANUAL. 2nd ed., Cold Spring Harbor Laboratory, Cold Spring Harbor Laboratory Press, Cold Spring Harbor, N.Y., 1989.

[0937] In some embodiments, the recombinant mammalian expression vector is capable of directing expression of the nucleic acid preferentially in a particular cell type (e.g., tissue-specific regulatory elements are used to express the nucleic acid). Tissue-specific regulatory elements are known in the art. Non-limiting examples of suitable tissue-specific promoters include the albumin promoter (liver-specific; Pinkert, et al., 1987. Genes Dev. 1: 268-277), lymphoid-specific promoters (Calame and Eaton, 1988. Adv. Immunol. 43: 235-275), in particular promoters of T cell receptors (Winoto and Baltimore, 1989. EMBO J. 8: 729-733) and immunoglobulins (Baneiji, et al., 1983. Cell 33: 729-740; Queen and Baltimore, 1983. Cell 33: 741-748), neuron-specific promoters (e.g., the neurofilament promoter; Byrne and Ruddle, 1989. Proc. Natl. Acad. Sci. USA 86: 5473-5477), pancreas-specific promoters (Edlund, et al., 1985. Science 230: 912-916), and mammary gland-specific promoters (e.g., milk whey promoter; U.S. Pat. No. 4,873,316 and European Application Publication No. 264,166). Developmentally-regulated promoters are also encompassed, e.g., the murine hox promoters (Kessel and Gruss, 1990. Science 249: 374-379) and the α-fetoprotein promoter (Campes and Tilghman, 1989. Genes Dev. 3: 537-546). With regards to these prokaryotic and eukaryotic vectors, mention is made of U.S. Pat. No. 6,750,059, the contents of which are incorporated by reference herein in their entirety. Other embodiments of the invention may relate to the use of viral vectors, with regards to which mention is made of U.S. patent application Ser. No. 13/092,085, the contents of which are incorporated by reference herein in their entirety. Tissue-specific regulatory elements are known in the art and in this regard, mention is made of U.S. Pat. No. 7,776,321, the contents of which are incorporated by reference herein in their entirety. In some embodiments, a regulatory element is operably linked to one or more elements of a CRISPR system so as to drive expression of the one or more elements of the CRISPR system. In general, CRISPRs (Clustered Regularly Interspaced Short Palindromic Repeats), also known as SPIDRs (SPacer Interspersed Direct Repeats), constitute a family of DNA loci that are usually specific to a particular bacterial species. The CRISPR locus comprises a distinct class of interspersed short sequence repeats (SSRs) that were recognized in E. coli (Ishino et al., J. Bacteriol., 169:5429-5433 [1987]; and Nakata et al., J. Bacteriol., 171:3553-3556 [1989]), and associated genes. Similar interspersed SSRs have been identified in Haloferax mediterranei, Streptococcus pyogenes, Anabaena, and Mycobacterium tuberculosis (See, Groenen et al., Mol. Microbiol., 10:1057-1065 [1993]; Hoe et al., Emerg. Infect. Dis., 5:254-263 [1999]; Masepohl et al., Biochim. Biophys. Acta 1307:26-30 [1996]; and Mojica et al., Mol. Microbiol., 17:85-93 [1995]). The CRISPR loci typically differ from other SSRs by the structure of the repeats, which have been termed short regularly spaced repeats (SRSRs) (Janssen et al., OMICS J. Integ. Biol., 6:23-33 [2002]; and Mojica et al., Mol. Microbiol., 36:244-246 [2000]). In general, the repeats are short elements that occur in clusters that are regularly spaced by unique intervening sequences with a substantially constant length (Mojica et al., [2000], supra). Although the repeat sequences are highly conserved between strains, the number of interspersed repeats and the sequences of the spacer regions typically differ from strain to strain (van Embden et al., J. Bacteriol., 182:2393-2401 [2000]). CRISPR loci have been identified in more than 40 prokaryotes (See e.g., Jansen et al., Mol. Microbiol., 43:1565-1575 [2002]; and Mojica et al., [2005]) including, but not limited to Aeropyrum, Pyrobaculum, Sulfolobus, Archaeoglobus, Halocarcula, Methanobacterium, Methanococcus, Methanosarcina, Methanopyrus, Pyrococcus, Picrophilus, Thermoplasma, Corynebacterium, Mycobacterium, Streptomyces, Aquifex, Porphyromonas, Chlorobium, Thermus, Bacillus, Listeria, Staphylococcus, Clostridium, Thermoanaerobacter, Mycoplasma, Fusobacterium, Azarcus, Chromobacterium, Neisseria, Nitrosomonas, Desulfovibrio, Geobacter, Myxococcus, Campylobacter, Wolinella, Acinetobacter, Erwinia, Escherichia, Legionella, Methylococcus, Pasteurella, Photobacterium, Salmonella, Xanthomonas, Yersinia, Treponema, and Thermotoga.

[0938] In general, “nucleic acid-targeting system” as used in the present application refers collectively to transcripts and other elements involved in the expression of or directing the activity of nucleic acid-targeting CRISPR-associated (“Cas”) genes (also referred to herein as an effector protein), including sequences encoding a nucleic acid-targeting Cas (effector) protein and a guide RNA or other sequences and transcripts from a nucleic acid-targeting CRISPR locus. In some embodiments, one or more elements of a nucleic acid-targeting system are derived from a Type V/Type VI nucleic acid-targeting CRISPR system. In some embodiments, one or more elements of a nucleic acid-targeting system is derived from a particular organism comprising an endogenous nucleic acid-targeting CRISPR system. In general, a nucleic acid-targeting system is characterized by elements that promote the formation of a nucleic acid-targeting complex at the site of a target sequence. In the context of formation of a nucleic acid-targeting complex, “target sequence” refers to a sequence to which a guide sequence is designed to have complementarity, where hybridization between a target sequence and a guide RNA promotes the formation of a DNA or RNA-targeting complex. Full complementarity is not necessarily required, provided there is sufficient complementarity to cause hybridization and promote formation of a nucleic acid-targeting complex. A target sequence may comprise RNA polynucleotides. In some embodiments, a target sequence is located in the nucleus or cytoplasm of a cell. In some embodiments, the target sequence may be within an organelle of a eukaryotic cell, for example, mitochondrion or chloroplast. A sequence or template that may be used for recombination into the targeted locus comprising the target sequences is referred to as an “editing template” or “editing RNA” or “editing sequence”. In aspects of the invention, an exogenous template RNA may be referred to as an editing template. In an aspect of the invention the recombination is homologous recombination.

[0939] Typically, in the context of an endogenous nucleic acid-targeting system, formation of a nucleic acid-targeting complex (comprising a guide RNA hybridized to a target sequence and complexed with one or more nucleic acid-targeting effector proteins) results in cleavage of one or both RNA strands in or near (e.g. within 1, 2, 3, 4, 5, 6, 7, 8, 9, 10, 20, 50, or more base pairs from) the target sequence. In some embodiments, one or more vectors driving expression of one or more elements of a nucleic acid-targeting system are introduced into a host cell such that expression of the elements of the nucleic acid-targeting system direct formation of a nucleic acid-targeting complex at one or more target sites. For example, a nucleic acid-targeting effector protein and a guide RNA could each be operably linked to separate regulatory elements on separate vectors. Alternatively, two or more of the elements expressed from the same or different regulatory elements, may be combined in a single vector, with one or more additional vectors providing any components of the nucleic acid-targeting system not included in the first vector. nucleic acid-targeting system elements that are combined in a single vector may be arranged in any suitable orientation, such as one element located 5′ with respect to (“upstream” of) or 3′ with respect to (“downstream” of) a second element. The coding sequence of one element may be located on the same or opposite strand of the coding sequence of a second element, and oriented in the same or opposite direction. In some embodiments, a single promoter drives expression of a transcript encoding a nucleic acid-targeting effector protein and a guide RNA embedded within one or more intron sequences (e.g. each in a different intron, two or more in at least one intron, or all in a single intron). In some embodiments, the nucleic acid-targeting effector protein and guide RNA are operably linked to and expressed from the same promoter.

[0940] In general, a guide sequence is any polynucleotide sequence having sufficient complementarity with a target polynucleotide sequence to hybridize with the target sequence and direct sequence-specific binding of a nucleic acid-targeting complex to the target sequence. In some embodiments, the degree of complementarity between a guide sequence and its corresponding target sequence, when optimally aligned using a suitable alignment algorithm, is about or more than about 50%, 60%, 75%, 80%, 85%, 90%, 95%, 97.5%, 99%, or more. Optimal alignment may be determined with the use of any suitable algorithm for aligning sequences, non-limiting example of which include the Smith-Waterman algorithm, the Needleman-Wunsch algorithm, algorithms based on the Burrows-Wheeler Transform (e.g. the Burrows Wheeler Aligner), ClustalW, Clustal X, BLAT, Novoalign (Novocraft Technologies, ELAND (Illumina, San Diego, Calif.), SOAP (available at soap.genomics.org.cn), and Maq (available at maq.sourceforge.net). In some embodiments, a guide sequence is about or more than about 5, 10, 11, 12, 13, 14, 15, 16, 17, 18, 19, 20, 21, 22, 23, 24, 25, 26, 27, 28, 29, 30, 35, 40, 45, 50, 75, or more nucleotides in length. In some embodiments, a guide sequence is less than about 75, 50, 45, 40, 35, 30, 25, 20, 15, 12, or fewer nucleotides in length. The ability of a guide sequence to direct sequence-specific binding of a nucleic acid-targeting complex to a target sequence may be assessed by any suitable assay. For example, the components of a nucleic acid-targeting system sufficient to form a nucleic acid-targeting complex, including the guide sequence to be tested, may be provided to a host cell having the corresponding target sequence, such as by transfection with vectors encoding the components of the nucleic acid-targeting CRISPR sequence, followed by an assessment of preferential cleavage within or in the vicinity of the target sequence, such as by Surveyor assay as described herein. Similarly, cleavage of a target polynucleotide sequence (or a sequence in the vicinity thereof) may be evaluated in a test tube by providing the target sequence, components of a nucleic acid-targeting complex, including the guide sequence to be tested and a control guide sequence different from the test guide sequence, and comparing binding or rate of cleavage at or in the vicinity of the target sequence between the test and control guide sequence reactions. Other assays are possible, and will occur to those skilled in the art.

[0941] A guide sequence may be selected to target any target sequence. In some embodiments, the target sequence is a sequence within a gene transcript or mRNA.

[0942] In some embodiments, the target sequence is a sequence within a genome of a cell.

[0943] In some embodiments, a guide sequence is selected to reduce the degree of secondary structure within the guide sequence. Secondary structure may be determined by any suitable polynucleotide folding algorithm. Some programs are based on calculating the minimal Gibbs free energy. An example of one such algorithm is mFold, as described by Zuker and Stiegler (Nucleic Acids Res. 9 (1981), 133-148). Another example folding algorithm is the online webserver RNAfold, developed at Institute for Theoretical Chemistry at the University of Vienna, using the centroid structure prediction algorithm (see e.g. A. R. Gruber et al., 2008, Cell 106(1): 23-24; and PA Carr and GM Church, 2009, Nature Biotechnology 27(12): 1151-62). Further algorithms may be found in U.S. application Ser. No. ______ (attorney docket 44790.11.2022; Broad Reference BI-2013/004A); incorporated herein by reference.

[0944] In some embodiments, a recombination template is also provided. A recombination template may be a component of another vector as described herein, contained in a separate vector, or provided as a separate polynucleotide. In some embodiments, a recombination template is designed to serve as a template in homologous recombination, such as within or near a target sequence nicked or cleaved by a nucleic acid-targeting effector protein as a part of a nucleic acid-targeting complex. A template polynucleotide may be of any suitable length, such as about or more than about 10, 15, 20, 25, 50, 75, 100, 150, 200, 500, 1000, or more nucleotides in length. In some embodiments, the template polynucleotide is complementary to a portion of a polynucleotide comprising the target sequence. When optimally aligned, a template polynucleotide might overlap with one or more nucleotides of a target sequences (e.g. about or more than about 1, 5, 10, 15, 20, 25, 30, 35, 40, 45, 50, 60, 70, 80, 90, 100 or more nucleotides). In some embodiments, when a template sequence and a polynucleotide comprising a target sequence are optimally aligned, the nearest nucleotide of the template polynucleotide is within about 1, 5, 10, 15, 20, 25, 50, 75, 100, 200, 300, 400, 500, 1000, 5000, 10000, or more nucleotides from the target sequence.

[0945] In some embodiments, the nucleic acid-targeting effector protein is part of a fusion protein comprising one or more heterologous protein domains (e.g., about or more than about 1, 2, 3, 4, 5, 6, 7, 8, 9, 10, or more domains in addition to the nucleic acid-targeting effector protein). In some embodiments, the CRISPR effector protein is part of a fusion protein comprising one or more heterologous protein domains (e.g. about or more than about 1, 2, 3, 4, 5, 6, 7, 8, 9, 10, or more domains in addition to the CRISPR enzyme). A CRISPR enzyme fusion protein may comprise any additional protein sequence, and optionally a linker sequence between any two domains. Examples of protein domains that may be fused to a CRISPR enzyme include, without limitation, epitope tags, reporter gene sequences, and protein domains having one or more of the following activities: methylase activity, demethylase activity, transcription activation activity, transcription repression activity, transcription release factor activity, histone modification activity, RNA cleavage activity and nucleic acid binding activity. Non-limiting examples of epitope tags include histidine (His) tags, V5 tags, FLAG tags, influenza hemagglutinin (HA) tags, Myc tags, VSV-G tags, and thioredoxin (Trx) tags. Examples of reporter genes include, but are not limited to, glutathione-S-transferase (GST), horseradish peroxidase (HRP), chloramphenicol acetyltransferase (CAT) beta-galactosidase, beta-glucuronidase, luciferase, green fluorescent protein (GFP), HcRed, DsRed, cyan fluorescent protein (CFP), yellow fluorescent protein (YFP), and autofluorescent proteins including blue fluorescent protein (BFP). A CRISPR enzyme may be fused to a gene sequence encoding a protein or a fragment of a protein that bind DNA molecules or bind other cellular molecules, including but not limited to maltose binding protein (MBP), S-tag, Lex A DNA binding domain (DBD) fusions, GAL4 DNA binding domain fusions, and herpes simplex virus (HSV) BP16 protein fusions. Additional domains that may form part of a fusion protein comprising a CRISPR enzyme are described in US20110059502, incorporated herein by reference. In some embodiments, a tagged CRISPR enzyme is used to identify the location of a target sequence.

[0946] In some embodiments, a CRISPR enzyme may form a component of an inducible system. The inducible nature of the system would allow for spatiotemporal control of gene editing or gene expression using a form of energy. The form of energy may include but is not limited to electromagnetic radiation, sound energy, chemical energy and thermal energy. Examples of inducible system include tetracycline inducible promoters (Tet-On or Tet-Off), small molecule two-hybrid transcription activations systems (FKBP, ABA, etc), or light inducible systems (Phytochrome, LOV domains, or cryptochrome). In one embodiment, the CRISPR enzyme may be a part of a Light Inducible Transcriptional Effector (LITE) to direct changes in transcriptional activity in a sequence-specific manner. The components of a light may include a CRISPR enzyme, a light-responsive cytochrome heterodimer (e.g. from Arabidopsis thaliana), and a transcriptional activation/repression domain. Further examples of inducible DNA binding proteins and methods for their use are provided in U.S. 61/736,465 and U.S. 61/721,283 and WO 2014/018423 and U.S. Pat. No. 8,889,418, U.S. Pat. No. 8,895,308, US20140186919, US20140242700, US20140273234, US20140335620, WO2014093635, which is hereby incorporated by reference in its entirety.

[0947] Delivery

[0948] In some aspects, the invention provides methods comprising delivering one or more polynucleotides, such as or one or more vectors as described herein, one or more transcripts thereof, and/or one or proteins transcribed therefrom, to a host cell. In some aspects, the invention further provides cells produced by such methods, and organisms (such as animals, plants, or fungi) comprising or produced from such cells. In some embodiments, a nucleic acid-targeting effector protein in combination with (and optionally complexed with) a guide RNA is delivered to a cell. Conventional viral and non-viral based gene transfer methods can be used to introduce nucleic acids in mammalian cells or target tissues. Such methods can be used to administer nucleic acids encoding components of a nucleic acid-targeting system to cells in culture, or in a host organism. Non-viral vector delivery systems include DNA plasmids, RNA (e.g. a transcript of a vector described herein), naked nucleic acid, and nucleic acid complexed with a delivery vehicle, such as a liposome. Viral vector delivery systems include DNA and RNA viruses, which have either episomal or integrated genomes after delivery to the cell. For a review of gene therapy procedures, see Anderson, Science 256:808-813 (1992); Nabel & Felgner, TIBTECH 11:211-217 (1993); Mitani & Caskey, TIBTECH 11:162-166 (1993); Dillon, TIBTECH 11:167-175 (1993); Miller, Nature 357:455-460 (1992); Van Brunt, Biotechnology 6(10):1149-1154 (1988); Vigne, Restorative Neurology and Neuroscience 8:35-36 (1995); Kremer & Perricaudet, British Medical Bulletin 51(1):31-44 (1995); Haddada et al., in Current Topics in Microbiology and Immunology, Doerfler and Bohm (eds) (1995); and Yu et al., Gene Therapy 1:13-26 (1994).

[0949] Methods of non-viral delivery of nucleic acids include lipofection, nucleofection, microinjection, biolistics, virosomes, liposomes, immunoliposomes, polycation or lipid:nucleic acid conjugates, naked DNA, artificial virions, and agent-enhanced uptake of DNA. Lipofection is described in e.g., U.S. Pat. Nos. 5,049,386, 4,946,787; and 4,897,355) and lipofection reagents are sold commercially (e.g., Transfectam™ and Lipofectin™). Cationic and neutral lipids that are suitable for efficient receptor-recognition lipofection of polynucleotides include those of Felgner, WO 91/17424; WO 91/16024. Delivery can be to cells (e.g. in vitro or ex vivo administration) or target tissues (e.g. in vivo administration).

[0950] The preparation of lipid:nucleic acid complexes, including targeted liposomes such as immunolipid complexes, is well known to one of skill in the art (see, e.g., Crystal, Science 270:404-410 (1995); Blaese et al., Cancer Gene Ther. 2:291-297 (1995); Behr et al., Bioconjugate Chem. 5:382-389 (1994); Remy et al., Bioconjugate Chem. 5:647-654 (1994); Gao et al., Gene Therapy 2:710-722 (1995); Ahmad et al., Cancer Res. 52:4817-4820 (1992); U.S. Pat. Nos. 4,186,183, 4,217,344, 4,235,871, 4,261,975, 4,485,054, 4,501,728, 4,774,085, 4,837,028, and 4,946,787).

[0951] The use of RNA or DNA viral based systems for the delivery of nucleic acids takes advantage of highly evolved processes for targeting a virus to specific cells in the body and trafficking the viral payload to the nucleus. Viral vectors can be administered directly to patients (in vivo) or they can be used to treat cells in vitro, and the modified cells may optionally be administered to patients (ex vivo). Conventional viral based systems could include retroviral, lentivirus, adenoviral, adeno-associated and herpes simplex virus vectors for gene transfer. Integration in the host genome is possible with the retrovirus, lentivirus, and adeno-associated virus gene transfer methods, often resulting in long term expression of the inserted transgene. Additionally, high transduction efficiencies have been observed in many different cell types and target tissues.

[0952] The tropism of a retrovirus can be altered by incorporating foreign envelope proteins, expanding the potential target population of target cells. Lentiviral vectors are retroviral vectors that are able to transduce or infect non-dividing cells and typically produce high viral titers. Selection of a retroviral gene transfer system would therefore depend on the target tissue. Retroviral vectors are comprised of cis-acting long terminal repeats with packaging capacity for up to 6-10 kb of foreign sequence. The minimum cis-acting LTRs are sufficient for replication and packaging of the vectors, which are then used to integrate the therapeutic gene into the target cell to provide permanent transgene expression. Widely used retroviral vectors include those based upon murine leukemia virus (MuLV), gibbon ape leukemia virus (GaLV), Simian Immuno deficiency virus (SIV), human immuno deficiency virus (HIV), and combinations thereof (see, e.g., Buchscher et al., J. Virol. 66:2731-2739 (1992); Johann et al., J. Virol. 66:1635-1640 (1992); Sommnerfelt et al., Virol. 176:58-59 (1990); Wilson et al., J. Virol. 63:2374-2378 (1989); Miller et al., J. Virol. 65:2220-2224 (1991); PCT/US94/05700),In applications where transient expression is preferred, adenoviral based systems may be used. Adenoviral based vectors are capable of very high transduction efficiency in many cell types and do not require cell division. With such vectors, high titer and levels of expression have been obtained. This vector can be produced in large quantities in a relatively simple system. Adeno-associated virus (“AAV”) vectors may also be used to transduce cells with target nucleic acids, e.g., in the in vitro production of nucleic acids and peptides, and for in vivo and ex vivo gene therapy procedures (see, e.g., West et al., Virology 160:38-47 (1987); U.S. Pat. No. 4,797,368; WO 93/24641; Kotin, Human Gene Therapy 5:793-801 (1994); Muzyczka, J. Clin. Invest. 94:1351 (1994). Construction of recombinant AAV vectors are described in a number of publications, including U.S. Pat. No. 5,173,414; Tratschin et al., Mol. Cell. Biol. 5:3251-3260 (1985); Tratschin, et al., Mol. Cell. Biol. 4:2072-2081 (1984); Hermonat & Muzyczka, PNAS 81:6466-6470 (1984); and Samulski et al., J. Virol. 63:03822-3828 (1989).

### Options for DNA/RNA or DNA/DNA or RNA/RNA or Protein/RNA

[0953] In some embodiments, the components of the CRISPR system may be delivered in various form, such as combinations of DNA/RNA or RNA/RNA or protein RNA. For example, the Cpf1 may be delivered as a DNA-coding polynucleotide or an RNA-coding polynucleotide or as a protein. The guide may be delivered may be delivered as a DNA-coding polynucleotide or an RNA. All possible combinations are envisioned, including mixed forms of delivery.

[0954] In some embodiments, all such combinations (DNA/RNA or DNA/DNA or RNA/RNA or protein/RNA).

[0955] In some embodiment, when the Cpf1 is delivered in protein form, it is possible to pre-assemble same with one or more guide/s.

### Nanoclews

[0956] Further, the CRISPR system may be delivered using nanoclews, for example as described in Sun W et al, Cocoon-like self-degradable DNA nanoclew for anticancer drug delivery., J Am Chem Soc. 2014 Oct. 22; 136(42): 14722-5. doi: 10.1021/ja5088024. Epub 2014 Oct. 13.; or in Sun W et al, Self-Assembled DNA Nanoclews for the Efficient Delivery of CRISPR-Cas9 for Genome Editing., Angew Chem Int Ed Engl. 2015 Oct. 5; 54(41): 12029-33. doi: 10.1002/anie.201506030. Epub 2015 Aug. 27.

[0957] The practice of the present invention employs, unless otherwise indicated, conventional techniques of immunology, biochemistry, chemistry, molecular biology, microbiology, cell biology, genomics and recombinant DNA, which are within the skill of the art. See Sambrook, Fritsch and Maniatis, MOLECULAR CLONING: A LABORATORY MANUAL, 2nd edition (1989); CURRENT PROTOCOLS IN MOLECULAR BIOLOGY (F. M. Ausubel, et al. eds., (1987)); the series METHODS IN ENZYMOLOGY (Academic Press, Inc.): PCR 2: A PRACTICAL APPROACH (M. J. MacPherson, B. D. Hames and G. R. Taylor eds. (1995)), Harlow and Lane, eds. (1988) ANTIBODIES, A LABORATORY MANUAL, and ANIMAL CELL CULTURE (R. I. Freshney, ed. (1987)).

### Models of Genetic and Epigenetic Conditions

[0958] A method of the invention may be used to create a plant, an animal or cell that may be used to model and/or study genetic or epitgenetic conditions of interest, such as a through a model of mutations of interest or a disease model. As used herein, “disease” refers to a disease, disorder, or indication in a subject. For example, a method of the invention may be used to create an animal or cell that comprises a modification in one or more nucleic acid sequences associated with a disease, or a plant, animal or cell in which the expression of one or more nucleic acid sequences associated with a disease are altered. Such a nucleic acid sequence may encode a disease associated protein sequence or may be a disease associated control sequence. Accordingly, it is understood that in embodiments of the invention, a plant, subject, patient, organism or cell can be a non-human subject, patient, organism or cell. Thus, the invention provides a plant, animal or cell, produced by the present methods, or a progeny thereof. The progeny may be a clone of the produced plant or animal, or may result from sexual reproduction by crossing with other individuals of the same species to introgress further desirable traits into their offspring. The cell may be in vivo or ex vivo in the cases of multicellular organisms, particularly animals or plants. In the instance where the cell is in cultured, a cell line may be established if appropriate culturing conditions are met and preferably if the cell is suitably adapted for this purpose (for instance a stem cell). Bacterial cell lines produced by the invention are also envisaged. Hence, cell lines are also envisaged.

[0959] In some methods, the disease model can be used to study the effects of mutations on the animal or cell and development and/or progression of the disease using measures commonly used in the study of the disease. Alternatively, such a disease model is useful for studying the effect of a pharmaceutically active compound on the disease.

[0960] In some methods, the disease model can be used to assess the efficacy of a potential gene therapy strategy. That is, a disease-associated gene or polynucleotide can be modified such that the disease development and/or progression is inhibited or reduced. In particular, the method comprises modifying a disease-associated gene or polynucleotide such that an altered protein is produced and, as a result, the animal or cell has an altered response. Accordingly, in some methods, a genetically modified animal may be compared with an animal predisposed to development of the disease such that the effect of the gene therapy event may be assessed.

[0961] In another embodiment, this invention provides a method of developing a biologically active agent that modulates a cell signaling event associated with a disease gene. The method comprises contacting a test compound with a cell comprising one or more vectors that drive expression of one or more of a CRISPR enzyme, and a direct repeat sequence linked to a guide sequence; and detecting a change in a readout that is indicative of a reduction or an augmentation of a cell signaling event associated with, e.g., a mutation in a disease gene contained in the cell.

[0962] A cell model or animal model can be constructed in combination with the method of the invention for screening a cellular function change. Such a model may be used to study the effects of a genome sequence modified by the CRISPR complex of the invention on a cellular function of interest. For example, a cellular function model may be used to study the effect of a modified genome sequence on intracellular signaling or extracellular signaling. Alternatively, a cellular function model may be used to study the effects of a modified genome sequence on sensory perception. In some such models, one or more genome sequences associated with a signaling biochemical pathway in the model are modified.

[0963] Several disease models have been specifically investigated. These include de novo autism risk genes CHD8, KATNAL2, and SCN2A; and the syndromic autism (Angelman Syndrome) gene UBE3A. These genes and resulting autism models are of course preferred, but serve to show the broad applicability of the invention across genes and corresponding models. An altered expression of one or more genome sequences associated with a signalling biochemical pathway can be determined by assaying for a difference in the mRNA levels of the corresponding genes between the test model cell and a control cell, when they are contacted with a candidate agent. Alternatively, the differential expression of the sequences associated with a signaling biochemical pathway is determined by detecting a difference in the level of the encoded polypeptide or gene product.

[0964] To assay for an agent-induced alteration in the level of mRNA transcripts or corresponding polynucleotides, nucleic acid contained in a sample is first extracted according to standard methods in the art. For instance, mRNA can be isolated using various lytic enzymes or chemical solutions according to the procedures set forth in Sambrook et al. (1989), or extracted by nucleic-acid-binding resins following the accompanying instructions provided by the manufacturers. The mRNA contained in the extracted nucleic acid sample is then detected by amplification procedures or conventional hybridization assays (e.g. Northern blot analysis) according to methods widely known in the art or based on the methods exemplified herein.

[0965] For purpose of this invention, amplification means any method employing a primer and a polymerase capable of replicating a target sequence with reasonable fidelity. Amplification may be carried out by natural or recombinant DNA polymerases such as TaqGold™, T7 DNA polymerase, Klenow fragment of E. coli DNA polymerase, and reverse transcriptase. A preferred amplification method is PCR. In particular, the isolated RNA can be subjected to a reverse transcription assay that is coupled with a quantitative polymerase chain reaction (RT-PCR) in order to quantify the expression level of a sequence associated with a signaling biochemical pathway.

[0966] Detection of the gene expression level can be conducted in real time in an amplification assay. In one aspect, the amplified products can be directly visualized with fluorescent DNA-binding agents including but not limited to DNA intercalators and DNA groove binders. Because the amount of the intercalators incorporated into the double-stranded DNA molecules is typically proportional to the amount of the amplified DNA products, one can conveniently determine the amount of the amplified products by quantifying the fluorescence of the intercalated dye using conventional optical systems in the art. DNA-binding dye suitable for this application include SYBR green, SYBR blue, DAPI, propidium iodine, Hoeste, SYBR gold, ethidium bromide, acridines, proflavine, acridine orange, acriflavine, fluorcoumanin, ellipticine, daunomycin, chloroquine, distamycin D, chromomycin, homidium, mithramycin, ruthenium polypyridyls, anthramycin, and the like.

[0967] In another aspect, other fluorescent labels such as sequence specific probes can be employed in the amplification reaction to facilitate the detection and quantification of the amplified products. Probe-based quantitative amplification relies on the sequence-specific detection of a desired amplified product. It utilizes fluorescent, target-specific probes (e.g., TaqMan® probes) resulting in increased specificity and sensitivity. Methods for performing probe-based quantitative amplification are well established in the art and are taught in U.S. Pat. No. 5,210,015.

[0968] In yet another aspect, conventional hybridization assays using hybridization probes that share sequence homology with sequences associated with a signaling biochemical pathway can be performed. Typically, probes are allowed to form stable complexes with the sequences associated with a signaling biochemical pathway contained within the biological sample derived from the test subject in a hybridization reaction. It will be appreciated by one of skill in the art that where antisense is used as the probe nucleic acid, the target polynucleotides provided in the sample are chosen to be complementary to sequences of the antisense nucleic acids. Conversely, where the nucleotide probe is a sense nucleic acid, the target polynucleotide is selected to be complementary to sequences of the sense nucleic acid.

[0969] Hybridization can be performed under conditions of various stringency. Suitable hybridization conditions for the practice of the present invention are such that the recognition interaction between the probe and sequences associated with a signaling biochemical pathway is both sufficiently specific and sufficiently stable. Conditions that increase the stringency of a hybridization reaction are widely known and published in the art. See, for example, (Sambrook, et al., (1989); Nonradioactive In Situ Hybridization Application Manual, Boehringer Mannheim, second edition). The hybridization assay can be formed using probes immobilized on any solid support, including but are not limited to nitrocellulose, glass, silicon, and a variety of gene arrays. A preferred hybridization assay is conducted on high-density gene chips as described in U.S. Pat. No. 5,445,934.

[0970] For a convenient detection of the probe-target complexes formed during the hybridization assay, the nucleotide probes are conjugated to a detectable label. Detectable labels suitable for use in the present invention include any composition detectable by photochemical, biochemical, spectroscopic, immunochemical, electrical, optical or chemical means. A wide variety of appropriate detectable labels are known in the art, which include fluorescent or chemiluminescent labels, radioactive isotope labels, enzymatic or other ligands. In preferred embodiments, one will likely desire to employ a fluorescent label or an enzyme tag, such as digoxigenin, β-galactosidase, urease, alkaline phosphatase or peroxidase, avidin/biotin complex.

[0971] The detection methods used to detect or quantify the hybridization intensity will typically depend upon the label selected above. For example, radiolabels may be detected using photographic film or a phosphoimager. Fluorescent markers may be detected and quantified using a photodetector to detect emitted light. Enzymatic labels are typically detected by providing the enzyme with a substrate and measuring the reaction product produced by the action of the enzyme on the substrate; and finally colorimetric labels are detected by simply visualizing the colored label.

[0972] An agent-induced change in expression of sequences associated with a signalling biochemical pathway can also be determined by examining the corresponding gene products. Determining the protein level typically involves a) contacting the protein contained in a biological sample with an agent that specifically bind to a protein associated with a signalling biochemical pathway; and (b) identifying any agent:protein complex so formed. In one aspect of this embodiment, the agent that specifically binds a protein associated with a signalling biochemical pathway is an antibody, preferably a monoclonal antibody.

[0973] The reaction is performed by contacting the agent with a sample of the proteins associated with a signaling biochemical pathway derived from the test samples under conditions that will allow a complex to form between the agent and the proteins associated with a signalling biochemical pathway. The formation of the complex can be detected directly or indirectly according to standard procedures in the art. In the direct detection method, the agents are supplied with a detectable label and unreacted agents may be removed from the complex; the amount of remaining label thereby indicating the amount of complex formed. For such method, it is preferable to select labels that remain attached to the agents even during stringent washing conditions. It is preferable that the label does not interfere with the binding reaction. In the alternative, an indirect detection procedure may use an agent that contains a label introduced either chemically or enzymatically. A desirable label generally does not interfere with binding or the stability of the resulting agent:polypeptide complex. However, the label is typically designed to be accessible to an antibody for an effective binding and hence generating a detectable signal.

[0974] A wide variety of labels suitable for detecting protein levels are known in the art. Non-limiting examples include radioisotopes, enzymes, colloidal metals, fluorescent compounds, bioluminescent compounds, and chemiluminescent compounds.

[0975] The amount of agent:polypeptide complexes formed during the binding reaction can be quantified by standard quantitative assays. As illustrated above, the formation of agent:polypeptide complex can be measured directly by the amount of label remained at the site of binding. In an alternative, the protein associated with a signaling biochemical pathway is tested for its ability to compete with a labeled analog for binding sites on the specific agent. In this competitive assay, the amount of label captured is inversely proportional to the amount of protein sequences associated with a signaling biochemical pathway present in a test sample.

[0976] A number of techniques for protein analysis based on the general principles outlined above are available in the art. They include but are not limited to radioimmunoassays, ELISA (enzyme linked immunoradiometric assays), “sandwich” immunoassays, immunoradiometric assays, in situ immunoassays (using e.g., colloidal gold, enzyme or radioisotope labels), western blot analysis, immunoprecipitation assays, immunofluorescent assays, and SDS-PAGE.

[0977] Antibodies that specifically recognize or bind to proteins associated with a signalling biochemical pathway are preferable for conducting the aforementioned protein analyses. Where desired, antibodies that recognize a specific type of post-translational modifications (e.g., signaling biochemical pathway inducible modifications) can be used. Post-translational modifications include but are not limited to glycosylation, lipidation, acetylation, and phosphorylation. These antibodies may be purchased from commercial vendors. For example, anti-phosphotyrosine antibodies that specifically recognize tyrosine-phosphorylated proteins are available from a number of vendors including Invitrogen and Perkin Elmer. Anti-phosphotyrosine antibodies are particularly useful in detecting proteins that are differentially phosphorylated on their tyrosine residues in response to an ER stress. Such proteins include but are not limited to eukaryotic translation initiation factor 2 alpha (eIF-2a). Alternatively, these antibodies can be generated using conventional polyclonal or monoclonal antibody technologies by immunizing a host animal or an antibody-producing cell with a target protein that exhibits the desired post-translational modification.

[0978] In practicing the subject method, it may be desirable to discern the expression pattern of an protein associated with a signaling biochemical pathway in different bodily tissue, in different cell types, and/or in different subcellular structures. These studies can be performed with the use of tissue-specific, cell-specific or subcellular structure specific antibodies capable of binding to protein markers that are preferentially expressed in certain tissues, cell types, or subcellular structures.

[0979] An altered expression of a gene associated with a signaling biochemical pathway can also be determined by examining a change in activity of the gene product relative to a control cell. The assay for an agent-induced change in the activity of a protein associated with a signaling biochemical pathway will dependent on the biological activity and/or the signal transduction pathway that is under investigation. For example, where the protein is a kinase, a change in its ability to phosphorylate the downstream substrate(s) can be determined by a variety of assays known in the art. Representative assays include but are not limited to immunoblotting and immunoprecipitation with antibodies such as anti-phosphotyrosine antibodies that recognize phosphorylated proteins. In addition, kinase activity can be detected by high throughput chemiluminescent assays such as AlphaScreen™ (available from Perkin Elmer) and eTag™ assay (Chan-Hui, et al. (2003) Clinical Immunology 111: 162-174).

[0980] Where the protein associated with a signaling biochemical pathway is part of a signaling cascade leading to a fluctuation of intracellular pH condition, pH sensitive molecules such as fluorescent pH dyes can be used as the reporter molecules. In another example where the protein associated with a signaling biochemical pathway is an ion channel, fluctuations in membrane potential and/or intracellular ion concentration can be monitored. A number of commercial kits and high-throughput devices are particularly suited for a rapid and robust screening for modulators of ion channels. Representative instruments include FLIPR™ (Molecular Devices, Inc.) and VIPR (Aurora Biosciences). These instruments are capable of detecting reactions in over 1000 sample wells of a microplate simultaneously, and providing real-time measurement and functional data within a second or even a minisecond.

[0981] In practicing any of the methods disclosed herein, a suitable vector can be introduced to a cell or an embryo via one or more methods known in the art, including without limitation, microinjection, electroporation, sonoporation, biolistics, calcium phosphate-mediated transfection, cationic transfection, liposome transfection, dendrimer transfection, heat shock transfection, nucleofection transfection, magnetofection, lipofection, impalefection, optical transfection, proprietary agent-enhanced uptake of nucleic acids, and delivery via liposomes, immunoliposomes, virosomes, or artificial virions. In some methods, the vector is introduced into an embryo by microinjection. The vector or vectors may be microinjected into the nucleus or the cytoplasm of the embryo. In some methods, the vector or vectors may be introduced into a cell by nucleofection.

[0982] The target polynucleotide of a CRISPR complex can be any polynucleotide endogenous or exogenous to the eukaryotic cell. For example, the target polynucleotide can be a polynucleotide residing in the nucleus of the eukaryotic cell. The target polynucleotide can be a sequence coding a gene product (e.g., a protein) or a non-coding sequence (e.g., a regulatory polynucleotide or a junk DNA).

[0983] Examples of target polynucleotides include a sequence associated with a signalling biochemical pathway, e.g., a signaling biochemical pathway-associated gene or polynucleotide. Examples of target polynucleotides include a disease associated gene or polynucleotide. A “disease-associated” gene or polynucleotide refers to any gene or polynucleotide which is yielding transcription or translation products at an abnormal level or in an abnormal form in cells derived from a disease-affected tissues compared with tissues or cells of a non disease control. It may be a gene that becomes expressed at an abnormally high level; it may be a gene that becomes expressed at an abnormally low level, where the altered expression correlates with the occurrence and/or progression of the disease. A disease-associated gene also refers to a gene possessing mutation(s) or genetic variation that is directly responsible or is in linkage disequilibrium with a gene(s) that is responsible for the etiology of a disease. The transcribed or translated products may be known or unknown, and may be at a normal or abnormal level.

[0984] The target polynucleotide of a CRISPR complex can be any polynucleotide endogenous or exogenous to the eukaryotic cell. For example, the target polynucleotide can be a polynucleotide residing in the nucleus of the eukaryotic cell. The target polynucleotide can be a sequence coding a gene product (e.g., a protein) or a non-coding sequence (e.g., a regulatory polynucleotide or a junk DNA). Without wishing to be bound by theory, it is believed that the target sequence should be associated with a PAM (protospacer adjacent motif); that is, a short sequence recognized by the CRISPR complex. The precise sequence and length requirements for the PAM differ depending on the CRISPR enzyme used, but PAMs are typically 2-5 base pair sequences adjacent the protospacer (that is, the target sequence) Examples of PAM sequences are given in the examples section below, and the skilled person will be able to identify further PAM sequences for use with a given CRISPR enzyme. Further, engineering of the PAM Interacting (PI) domain may allow programming of PAM specificity, improve target site recognition fidelity, and increase the versatility of the Cas, e.g. Cas9, genome engineering platform. Cas proteins, such as Cas9 proteins may be engineered to alter their PAM specificity, for example as described in Kleinstiver B P et al. Engineered CRISPR-Cas9 nucleases with altered PAM specificities. Nature. 2015 Jul. 23; 523 (7561): 481-5. doi: 10.1038/nature14592.

[0985] The target polynucleotide of a CRISPR complex may include a number of disease-associated genes and polynucleotides as well as signaling biochemical pathway-associated genes and polynucleotides as listed in U.S. provisional patent applications 61/736,527 and 61/748,427 having Broad reference BI-2011/008/WSGR Docket No. 44063-701.101 and BI-2011/008/WSGR Docket No. 44063-701.102 respectively, both entitled SYSTEMS METHODS AND COMPOSITIONS FOR SEQUENCE MANIPULATION filed on Dec. 12, 2012 and Jan. 2, 2013, respectively, and PCT Application PCT/US2013/074667, entitled DELIVERY, ENGINEERING AND OPTIMIZATION OF SYSTEMS, METHODS AND COMPOSITIONS FOR SEQUENCE MANIPULATION AND THERAPEUTIC APPLICATIONS, filed Dec. 12, 2013, the contents of all of which are herein incorporated by reference in their entirety.

[0986] Examples of target polynucleotides include a sequence associated with a signalling biochemical pathway, e.g., a signaling biochemical pathway-associated gene or polynucleotide. Examples of target polynucleotides include a disease associated gene or polynucleotide. A “disease-associated” gene or polynucleotide refers to any gene or polynucleotide which is yielding transcription or translation products at an abnormal level or in an abnormal form in cells derived from a disease-affected tissues compared with tissues or cells of a non disease control. It may be a gene that becomes expressed at an abnormally high level; it may be a gene that becomes expressed at an abnormally low level, where the altered expression correlates with the occurrence and/or progression of the disease. A disease-associated gene also refers to a gene possessing mutation(s) or genetic variation that is directly responsible or is in linkage disequilibrium with a gene(s) that is responsible for the etiology of a disease. The transcribed or translated products may be known or unknown, and may be at a normal or abnormal level.

### Genome Wide Knock-Out Screening

[0987] The CRISPR proteins and systems described herein can be used to perform efficient and cost effective functional genomic screens. Such screens can utilize CRISPR effector protein based genome wide libraries. Such screens and libraries can provide for determining the function of genes, cellular pathways genes are involved in, and how any alteration in gene expression can result in a particular biological process. An advantage of the present invention is that the CRISPR system avoids off-target binding and its resulting side effects. This is achieved using systems arranged to have a high degree of sequence specificity for the target DNA. In preferred embodiments of the invention, the CRISPR effector protein complexes are Cpf1 effector protein complexes.

[0988] In embodiments of the invention, a genome wide library may comprise a plurality of Cpf1 guide RNAs, as described herein, comprising guide sequences that are capable of targeting a plurality of target sequences in a plurality of genomic loci in a population of eukaryotic cells. The population of cells may be a population of embryonic stem (ES) cells. The target sequence in the genomic locus may be a non-coding sequence. The non-coding sequence may be an intron, regulatory sequence, splice site, 3′ UTR, 5′ UTR, or polyadenylation signal. Gene function of one or more gene products may be altered by said targeting. The targeting may result in a knockout of gene function. The targeting of a gene product may comprise more than one guide RNA. A gene product may be targeted by 2, 3, 4, 5, 6, 7, 8, 9, or 10 guide RNAs, preferably 3 to 4 per gene. Off-target modifications may be minimized by exploiting the staggered double strand breaks generated by Cpf1 effector protein complexes or by utilizing methods analogous to those used in CRISPR-Cas9 systems (See, e.g., DNA targeting specificity of RNA-guided Cas9 nucleases. Hsu, P., Scott, D., Weinstein, J., Ran, F A., Konermann, S., Agarwala, V., Li, Y., Fine, E., Wu, X., Shalem, O., Cradick, T J., Marraffini, L A., Bao, G., & Zhang, F. Nat Biotechnol doi:10.1038/nbt.2647 (2013)), incorporated herein by reference. The targeting may be of about 100 or more sequences. The targeting may be of about 1000 or more sequences. The targeting may be of about 20,000 or more sequences. The targeting may be of the entire genome. The targeting may be of a panel of target sequences focused on a relevant or desirable pathway. The pathway may be an immune pathway. The pathway may be a cell division pathway.

[0989] One aspect of the invention comprehends a genome wide library that may comprise a plurality of Cpf1 guide RNAs that may comprise guide sequences that are capable of targeting a plurality of target sequences in a plurality of genomic loci, wherein said targeting results in a knockout of gene function. This library may potentially comprise guide RNAs that target each and every gene in the genome of an organism.

[0990] In some embodiments of the invention the organism or subject is a eukaryote (including mammal including human) or a non-human eukaryote or a non-human animal or a non-human mammal. In some embodiments, the organism or subject is a non-human animal, and may be an arthropod, for example, an insect, or may be a nematode. In some methods of the invention the organism or subject is a plant. In some methods of the invention the organism or subject is a mammal or a non-human mammal. A non-human mammal may be for example a rodent (preferably a mouse or a rat), an ungulate, or a primate. In some methods of the invention the organism or subject is algae, including microalgae, or is a fungus.

[0991] The knockout of gene function may comprise: introducing into each cell in the population of cells a vector system of one or more vectors comprising an engineered, non-naturally occurring Cpf1 effector protein system comprising I. a Cpf1 effector protein, and II. one or more guide RNAs, wherein components I and II may be same or on different vectors of the system, integrating components I and II into each cell, wherein the guide sequence targets a unique gene in each cell, wherein the Cpf1 effector protein is operably linked to a regulatory element, wherein when transcribed, the guide RNA comprising the guide sequence directs sequence-specific binding of the Cpf1 effector protein system to a target sequence in the genomic loci of the unique gene, inducing cleavage of the genomic loci by the Cpf1 effector protein, and confirming different knockout mutations in a plurality of unique genes in each cell of the population of cells thereby generating a gene knockout cell library. The invention comprehends that the population of cells is a population of eukaryotic cells, and in a preferred embodiment, the population of cells is a population of embryonic stem (ES) cells.

[0992] The one or more vectors may be plasmid vectors. The vector may be a single vector comprising a Cpf1 effector protein, a gRNA, and optionally, a selection marker into target cells. Not being bound by a theory, the ability to simultaneously deliver a Cpf1 effector protein and gRNA through a single vector enables application to any cell type of interest, without the need to first generate cell lines that express the Cpf1 effector protein. The regulatory element may be an inducible promoter. The inducible promoter may be a doxycycline inducible promoter. In some methods of the invention the expression of the guide sequence is under the control of the T7 promoter and is driven by the expression of T7 polymerase. The confirming of different knockout mutations may be by whole exome sequencing. The knockout mutation may be achieved in 100 or more unique genes. The knockout mutation may be achieved in 1000 or more unique genes. The knockout mutation may be achieved in 20,000 or more unique genes. The knockout mutation may be achieved in the entire genome. The knockout of gene function may be achieved in a plurality of unique genes which function in a particular physiological pathway or condition. The pathway or condition may be an immune pathway or condition. The pathway or condition may be a cell division pathway or condition.

[0993] The invention also provides kits that comprise the genome wide libraries mentioned herein. The kit may comprise a single container comprising vectors or plasmids comprising the library of the invention. The kit may also comprise a panel comprising a selection of unique Cpf1 effector protein system guide RNAs comprising guide sequences from the library of the invention, wherein the selection is indicative of a particular physiological condition. The invention comprehends that the targeting is of about 100 or more sequences, about 1000 or more sequences or about 20,000 or more sequences or the entire genome. Furthermore, a panel of target sequences may be focused on a relevant or desirable pathway, such as an immune pathway or cell division.

[0994] In an additional aspect of the invention, the Cpf1 effector protein may comprise one or more mutations and may be used as a generic DNA binding protein with or without fusion to a functional domain. The mutations may be artificially introduced mutations or gain- or loss-of-function mutations. The mutations have been characterized as described herein. In one aspect of the invention, the functional domain may be a transcriptional activation domain, which may be VP64. In other aspects of the invention, the functional domain may be a transcriptional repressor domain, which may be KRAB or SID4X. Other aspects of the invention relate to the mutated Cpf1 effector protein being fused to domains which include but are not limited to a transcriptional activator, repressor, a recombinase, a transposase, a histone remodeler, a demethylase, a DNA methyltransferase, a cryptochrome, a light inducible/controllable domain or a chemically inducible/controllable domain. Some methods of the invention can include inducing expression of targeted genes. In one embodiment, inducing expression by targeting a plurality of target sequences in a plurality of genomic loci in a population of eukaryotic cells is by use of a functional domain.

[0995] Useful in the practice of the instant invention utilizing Cpf1 effector protein complexes are methods used in CRISPR-Cas9 systems and reference is made to:

[0996] Genome-Scale CRISPR-Cas9 Knockout Screening in Human Cells. Shalem, O., Sanjana, N E., Hartenian, E., Shi, X., Scott, DA., Mikkelson, T., Heckl, D., Ebert, B L., Root, D E., Doench, J G., Zhang, F. Science Dec. 12. (2013). [Epub ahead of print]; Published in final edited form as: Science. 2014 Jan. 3; 343(6166): 84-87.

[0997] Shalem et al. involves a new way to interrogate gene function on a genome-wide scale. Their studies showed that delivery of a genome-scale CRISPR-Cas9 knockout (GeCKO) library targeted 18,080 genes with 64,751 unique guide sequences enabled both negative and positive selection screening in human cells. First, the authors showed use of the GeCKO library to identify genes essential for cell viability in cancer and pluripotent stem cells. Next, in a melanoma model, the authors screened for genes whose loss is involved in resistance to vemurafenib, a therapeutic that inhibits mutant protein kinase BRAF. Their studies showed that the highest-ranking candidates included previously validated genes NF1 and MED12 as well as novel hitsNF2, CUL3, TADA2B, and TADA1. The authors observed a high level of consistency between independent guide RNAs targeting the same gene and a high rate of hit confirmation, and thus demonstrated the promise of genome-scale screening with Cas9.

[0998] Reference is also made to US patent publication number US20140357530; and PCT Patent Publication WO2014093701, hereby incorporated herein by reference. Reference is also made to NIH Press Release of Oct. 22, 2015 entitled, “Researchers identify potential alternative to CRISPR-Cas genome editing tools: New Cas enzymes shed light on evolution of CRISPR-Cas systems, which is incorporated by reference.

### Functional Alteration and Screening

[0999] In another aspect, the present invention provides for a method of functional evaluation and screening of genes. The use of the CRISPR system of the present invention to precisely deliver functional domains, to activate or repress genes or to alter epigenetic state by precisely altering the methylation site on a specific locus of interest, can be with one or more guide RNAs applied to a single cell or population of cells or with a library applied to genome in a pool of cells ex vivo or in vivo comprising the administration or expression of a library comprising a plurality of guide RNAs (gRNAs) and wherein the screening further comprises use of a Cpf1 effector protein, wherein the CRISPR complex comprising the Cpf1 effector protein is modified to comprise a heterologous functional domain. In an aspect the invention provides a method for screening a genome comprising the administration to a host or expression in a host in vivo of a library. In an aspect the invention provides a method as herein discussed further comprising an activator administered to the host or expressed in the host. In an aspect the invention provides a method as herein discussed wherein the activator is attached to a Cpf1 effector protein. In an aspect the invention provides a method as herein discussed wherein the activator is attached to the N terminus or the C terminus of the Cpf1 effector protein. In an aspect the invention provides a method as herein discussed wherein the activator is attached to a gRNA loop. In an aspect the invention provides a method as herein discussed further comprising a repressor administered to the host or expressed in the host. In an aspect the invention provides a method as herein discussed, wherein the screening comprises affecting and detecting gene activation, gene inhibition, or cleavage in the locus.

[1000] In an aspect, the invention provides efficient on-target activity and minimizes off target activity. In an aspect, the invention provides efficient on-target cleavage by Cpf1 effector protein and minimizes off-target cleavage by the Cpf1 effector protein. In an aspect, the invention provides guide specific binding of Cpf1 effector protein at a gene locus without DNA cleavage. Accordingly, in an aspect, the invention provides target-specific gene regulation. In an aspect, the invention provides guide specific binding of Cpf1 effector protein at a gene locus without DNA cleavage. Accordingly, in an aspect, the invention provides for cleavage at one gene locus and gene regulation at a different gene locus using a single Cpf1 effector protein. In an aspect, the invention provides orthogonal activation and/or inhibition and/or cleavage of multiple targets using one or more Cpf1 effector protein and/or enzyme.

[1001] In an aspect the invention provides a method as herein discussed, wherein the host is a eukaryotic cell. In an aspect the invention provides a method as herein discussed, wherein the host is a mammalian cell. In an aspect the invention provides a method as herein discussed, wherein the host is a non-human eukaryote. In an aspect the invention provides a method as herein discussed, wherein the non-human eukaryote is a non-human mammal. In an aspect the invention provides a method as herein discussed, wherein the non-human mammal is a mouse. An aspect the invention provides a method as herein discussed comprising the delivery of the Cpf1 effector protein complexes or component(s) thereof or nucleic acid molecule(s) coding therefor, wherein said nucleic acid molecule(s) are operatively linked to regulatory sequence(s) and expressed in vivo. In an aspect the invention provides a method as herein discussed wherein the expressing in vivo is via a lentivirus, an adenovirus, or an AAV. In an aspect the invention provides a method as herein discussed wherein the delivery is via a particle, a nanoparticle, a lipid or a cell penetrating peptide (CPP).

[1002] In an aspect the invention provides a pair of CRISPR complexes comprising Cpf1 effector protein, each comprising a guide RNA (gRNA) comprising a guide sequence capable of hybridizing to a target sequence in a genomic locus of interest in a cell, wherein at least one loop of each gRNA is modified by the insertion of distinct RNA sequence(s) that bind to one or more adaptor proteins, and wherein the adaptor protein is associated with one or more functional domains, wherein each gRNA of each Cpf1 effector protein complex comprises a functional domain having a DNA cleavage activity. In an aspect the invention provides paired Cpf1 effector protein complexes as herein-discussed, wherein the DNA cleavage activity is due to a Fok1 nuclease.

[1003] In an aspect the invention provides a method for cutting a target sequence in a genomic locus of interest comprising delivery to a cell of the Cpf1 effector protein complexes or component(s) thereof or nucleic acid molecule(s) coding therefor, wherein said nucleic acid molecule(s) are operatively linked to regulatory sequence(s) and expressed in vivo. In an aspect the invention provides a method as herein-discussed wherein the delivery is via a lentivirus, an adenovirus, or an AAV. In an aspect the invention provides a method as herein-discussed or paired Cpf1 effector protein complexes as herein-discussed wherein the target sequence for a first complex of the pair is on a first strand of double stranded DNA and the target sequence for a second complex of the pair is on a second strand of double stranded DNA. In an aspect the invention provides a method as herein-discussed or paired Cpf1 effector protein complexes as herein-discussed wherein the target sequences of the first and second complexes are in proximity to each other such that the DNA is cut in a manner that facilitates homology directed repair. In an aspect a herein method can further include introducing into the cell template DNA. In an aspect a herein method or herein paired Cpf1 effector protein complexes can involve wherein each Cpf1 effector protein complex has a Cpf1 effector enzyme that is mutated such that it has no more than about 5% of the nuclease activity of the Cpf1 effector enzyme that is not mutated.

[1004] In an aspect the invention provides a library, method or complex as herein-discussed wherein the gRNA is modified to have at least one non-coding functional loop, e.g., wherein the at least one non-coding functional loop is repressive; for instance, wherein the at least one non-coding functional loop comprises Alu.

[1005] In one aspect, the invention provides a method for altering or modifying expression of a gene product. The said method may comprise introducing into a cell containing and expressing a DNA molecule encoding the gene product an engineered, non-naturally occurring CRISPR system comprising a Cpf1 effector protein and guide RNA that targets the DNA molecule, whereby the guide RNA targets the DNA molecule encoding the gene product and the Cpf1 effector protein cleaves the DNA molecule encoding the gene product, whereby expression of the gene product is altered; and, wherein the Cpf1 effector protein and the guide RNA do not naturally occur together. The invention comprehends the guide RNA comprising a guide sequence linked to a direct repeat sequence. The invention further comprehends the Cpf1 effector protein being codon optimized for expression in a Eukaryotic cell. In a preferred embodiment the Eukaryotic cell is a mammalian cell and in a more preferred embodiment the mammalian cell is a human cell. In a further embodiment of the invention, the expression of the gene product is decreased.

[1006] In some embodiments, one or more functional domains are associated with the Cpf1 effector protein. In some embodiments, one or more functional domains are associated with an adaptor protein, for example as used with the modified guides of Konnerman et al. (Nature 517, 583-588, 29 Jan. 2015). In some embodiments, one or more functional domains are associated with an dead gRNA (dRNA). In some embodiments, a dRNA complex with active Cpf1 effector protein directs gene regulation by a functional domain at on gene locus while an gRNA directs DNA cleavage by the active Cpf1 effector protein at another locus, for example as described analogously in CRISPR-Cas9 systems by Dahlman et al., ‘Orthogonal gene control with a catalytically active Cas9 nuclease’ (in press). In some embodiments, dRNAs are selected to maximize selectivity of regulation for a gene locus of interest compared to off-target regulation. In some embodiments, dRNAs are selected to maximize target gene regulation and minimize target cleavage

[1007] For the purposes of the following discussion, reference to a functional domain could be a functional domain associated with the Cpf1 effector protein or a functional domain associated with the adaptor protein.

[1008] In the practice of the invention, loops of the gRNA may be extended, without colliding with the Cpf1 protein by the insertion of distinct RNA loop(s) or distinct sequence(s) that may recruit adaptor proteins that can bind to the distinct RNA loop(s) or distinct sequence(s). The adaptor proteins may include but are not limited to orthogonal RNA-binding protein/aptamer combinations that exist within the diversity of bacteriophage coat proteins. A list of such coat proteins includes, but is not limited to: Qβ, F2, GA, fr, JP501, M12, R17, BZ13, JP34, JP500, KU1, M11, MX1, TW18, VK, SP, FI, ID2, NL95, TW19, AP205, φCb5, φCb8r, φCb12r, φCb23r, 7s and PRR1. These adaptor proteins or orthogonal RNA binding proteins can further recruit effector proteins or fusions which comprise one or more functional domains. In some embodiments, the functional domain may be selected from the group consisting of: transposase domain, integrase domain, recombinase domain, resolvase domain, invertase domain, protease domain, DNA methyltransferase domain, DNA hydroxylmethylase domain, DNA demethylase domain, histone acetylase domain, histone deacetylases domain, nuclease domain, repressor domain, activator domain, nuclear-localization signal domains, transcription-regulatory protein (or transcription complex recruiting) domain, cellular uptake activity associated domain, nucleic acid binding domain, antibody presentation domain, histone modifying enzymes, recruiter of histone modifying enzymes; inhibitor of histone modifying enzymes, histone methyltransferase, histone demethylase, histone kinase, histone phosphatase, histone ribosylase, histone deribosylase, histone ubiquitinase, histone deubiquitinase, histone biotinase and histone tail protease. In some preferred embodiments, the functional domain is a transcriptional activation domain, such as, without limitation, VP64, p65, MyoD1, HSF1, RTA, SET7/9 or a histone acetyltransferase. In some embodiments, the functional domain is a transcription repression domain, preferably KRAB. In some embodiments, the transcription repression domain is SID, or concatemers of SID (eg SID4X). In some embodiments, the functional domain is an epigenetic modifying domain, such that an epigenetic modifying enzyme is provided. In some embodiments, the functional domain is an activation domain, which may be the P65 activation domain.

[1009] In some embodiments, the one or more functional domains is an NLS (Nuclear Localization Sequence) or an NES (Nuclear Export Signal). In some embodiments, the one or more functional domains is a transcriptional activation domain comprises VP64, p65, MyoD1, HSF1, RTA, SET7/9 and a histone acetyltransferase. Other references herein to activation (or activator) domains in respect of those associated with the CRISPR enzyme include any known transcriptional activation domain and specifically VP64, p65, MyoD1, HSF1, RTA, SET7/9 or a histone acetyltransferase.

[1010] In some embodiments, the one or more functional domains is a transcriptional repressor domain. In some embodiments, the transcriptional repressor domain is a KRAB domain. In some embodiments, the transcriptional repressor domain is a NuE domain, NcoR domain, SID domain or a SID4X domain.

[1011] In some embodiments, the one or more functional domains have one or more activities comprising methylase activity, demethylase activity, transcription activation activity, transcription repression activity, transcription release factor activity, histone modification activity, RNA cleavage activity, DNA cleavage activity, DNA integration activity or nucleic acid binding activity.

[1012] Histone modifying domains are also preferred in some embodiments. Exemplary histone modifying domains are discussed below. Transposase domains, HR (Homologous Recombination) machinery domains, recombinase domains, and/or integrase domains are also preferred as the present functional domains. In some embodiments, DNA integration activity includes HR machinery domains, integrase domains, recombinase domains and/or transposase domains. Histone acetyltransferases are preferred in some embodiments.

[1013] In some embodiments, the DNA cleavage activity is due to a nuclease. In some embodiments, the nuclease comprises a Fok1 nuclease. See, “Dimeric CRISPR RNA-guided FokI nucleases for highly specific genome editing”, Shengdar Q. Tsai, Nicolas Wyvekens, Cyd Khayter, Jennifer A. Foden, Vishal Thapar, Deepak Reyon, Mathew J. Goodwin, Martin J. Aryee, J. Keith Joung Nature Biotechnology 32(6): 569-77 (2014), relates to dimeric RNA-guided FokI Nucleases that recognize extended sequences and can edit endogenous genes with high efficiencies in human cells.

[1014] In some embodiments, the one or more functional domains is attached to the Cpf1 effector protein so that upon binding to the sgRNA and target the functional domain is in a spatial orientation allowing for the functional domain to function in its attributed function.

[1015] In some embodiments, the one or more functional domains is attached to the adaptor protein so that upon binding of the Cpf1 effector protein to the gRNA and target, the functional domain is in a spatial orientation allowing for the functional domain to function in its attributed function.

[1016] In an aspect the invention provides a composition as herein discussed wherein the one or more functional domains is attached to the Cpf1 effector protein or adaptor protein via a linker, optionally a GlySer linker, as discussed herein.

[1017] Endogenous transcriptional repression is often mediated by chromatin modifying enzymes such as histone methyltransferases (HMTs) and deacetylases (HDACs). Repressive histone effector domains are known and an exemplary list is provided below. In the exemplary table, preference was given to proteins and functional truncations of small size to facilitate efficient viral packaging (for instance via AAV). In general, however, the domains may include HDACs, histone methyltransferases (HMTs), and histone acetyltransferase (HAT) inhibitors, as well as HDAC and HMT recruiting proteins. The functional domain may be or include, in some embodiments, HDAC Effector Domains, HDAC Recruiter Effector Domains, Histone Methyltransferase (HMT) Effector Domains, Histone Methyltransferase (HMT) Recruiter Effector Domains, or Histone Acetyltransferase Inhibitor Effector Domains.

### HDAC Effector Domains

| | | | | | Full | | Final | |
|---|---|---|---|---|---|---|---|---|
| Subtype/ | | Substrate | Modification | | size | Selected | size | Catalytic |
| Complex | Name | (if known) | (if known) | Organism | (aa) | truncation (aa) | (aa) | domain |
| HDAC I | HDAC8 | — | — | X. laevis | 325 | 1-325 | 325 | 1-272: |
| | | | | | | | | HDAC |
| HDAC I | RPD3 | — | — | S. cerevisiae | 433 | 19-340 | 322 | 19-331: |
| | | | | | | | (Vannier) | HDAC |
| HDAC | MesoLo4 | — | — | M. loti | 300 | 1-300 | 300 | |
| IV | | | | | | (Gregoretti) | | |
| HDAC | HDAC11 | — | — | H. sapiens | 347 | 1-347 | 347 | 14-326: |
| IV | | | | | | (Gao) | | HDAC |
| HD2 | HDT1 | — | — | A. thaliana | 245 | 1-211 | 211 | |
| | | | | | | (Wu) | | |
| SIRT I | SIRT3 | H3K9Ac | — | H. sapiens | 399 | 143-399 | 257 | 126-382: |
| | | H4K16Ac | | | | (Scher) | | SIRT |
| | | H3K56Ac | | | | | | |
| SIRT I | HST2 | — | — | C. albicans | 331 | 1-331 (Hnisz) | 331 | |
| SIRT I | CobB | — | — | E. coli (K12) | 242 | 1-242 (Landry) | 242 | |
| SIRT I | HST2 | — | — | S. cerevisiae | 357 | 8-298 (Wilson) | 291 | |
| SIRT III | SIRT5 | H4K8Ac | — | H. sapiens | 310 | 37-310 (Gertz) | 274 | 41-309: |
| | | H4K16Ac | — | | | | | SIRT |
| SIRT III | Sir2A | — | — | P. | 273 | 1-273 (Zhu) | 273 | 19-273: |
| | | | | falciparum | | | | SIRT |
| SIRT IV | SIRT6 | H3K9Ac | — | H. sapiens | 355 | 1-289 | 289 | 35-274: |
| | | H3K56Ac | | | | (Tennen) | | SIRT |

[1019] Accordingly, the repressor domains of the present invention may be selected from histone methyltransferases (HMTs), histone deacetylases (HDACs), histone acetyltransferase (HAT) inhibitors, as well as HDAC and HMT recruiting proteins.

[1020] The HDAC domain may be any of those in the table above, namely: HDAC8, RPD3, MesoLo4, HDAC11, HDT1, SIRT3, HST2, CobB, HST2, SIRT5, Sir2A, or SIRT6.

[1021] In some embodiment, the functional domain may be a HDAC Recruiter Effector Domain. Preferred examples include those in the Table below, namely MeCP2, MBD2b, Sin3a, NcoR, SALL1, RCOR1. NcoR is exemplified in the present Examples and, although preferred, it is envisaged that others in the class will also be useful.

Table of HDAC Recruiter Effector Domains

| | | Substrate | Modification | | Full | | Final | |
|---|---|---|---|---|---|---|---|---|
| Subtype/ | | (if | (if | | size | Selected | size | Catalytic |
| Complex | Name | known) | known) | Organism | (aa) | truncation (aa) | (aa) | domain |
| Sin3a | MeCP2 | — | — | R. norvegicus | 492 | 207-492 (Nan) | 286 | — |
| Sin3a | MBD2b | — | — | H. sapiens | 262 | 45-262 | 218 | — |
| | | | | | | (Boeke) | | |
| Sin3a | Sin3a | — | — | H. sapiens | 1273 | 524-851 | 328 | 627-829: |
| | | | | | | (Laherty) | | HDAC1 |
| | | | | | | | | interaction |
| NcoR | NcoR | — | — | H. sapiens | 2440 | 420-488 | 69 | — |
| | | | | | | (Zhang) | | |
| NuRD | SALL1 | — | — | M. musculus | 1322 | 1-93 | 93 | — |
| | | | | | | (Lauberth) | | |
| CoREST | RCOR1 | — | — | H. sapiens | 482 | 81-300 (Gu, | 220 | — |
| | | | | | | Ouyang) | | |

[1022] In some embodiment, the functional domain may be a Methyltransferase (HMT) Effector Domain. Preferred examples include those in the Table below, namely NUE, vSET, EHMT2/G9A, SUV39H1, dim-5, KYP, SUVR4, SET4, SET1, SETD8, and TgSET8. NUE is exemplified in the present Examples and, although preferred, it is envisaged that others in the class will also be useful.

Table of Histone Methyltransferase (HMT) Effector Domains

| | | Substrate | Modification | | Full | Selected | Final | |
|---|---|---|---|---|---|---|---|---|
| Subtype/ | | (if | (if | | size | truncation | size | Catalytic |
| Complex | Name | known) | known) | Organism | (aa) | (aa) | (aa) | domain |
| SET | NUE | H2B, | — | C. trachomatis | 219 | 1-219 | 219 | — |
| | | H3, H4 | | | | (Pennini) | | |
| SET | vSET | — | H3K27me3 | P. bursaria | 119 | 1-119 | 119 | 4-112: |
| | | | | chlorella virus | | (Mujtaba) | | SET2 |
| SUV39 | EHMT | H1.4K2, | H3K9me1/2, | M. musculus | 1263 | 969-1263 | 295 | 1025-1233: |
| family | 2/G9A | H3K9, | H1K25me1 | | | (Tachibana) | | preSET, SET, |
| | | H3K27 | | | | | | postSET |
| SUV39 | SUV39 | — | H3K9me2/3 | H. sapiens | 412 | 79-412 | 334 | 172-412: |
| | H1 | | | | | (Snowden) | | preSET, SET, |
| | | | | | | | | postSET |
| Suvar3-9 | dim-5 | — | H3K9me3 | N. crassa | 331 | 1-331 | 331 | 77-331: |
| | | | | | | (Rathert) | | preSET, SET, |
| | | | | | | | | postSET |
| Suvar3-9 | KYP | — | H3K9me1/2 | A. thaliana | 624 | 335-601 | 267 | — |
| (SUVH | | | | | | | (Jackson) | |
| subfamily) | | | | | | | | |
| Suvar3-9 | SUVR | H3K9me1 | H3K9me2/3 | A. thaliana | 492 | 180-492 | 313 | 192-462: |
| (SUVR | 4 | | | | | | (Thor- | preSET, SET, |
| subfamily) | | | | | | | stensen) | postSET |
| Suvar4- | SET4 | — | H4K20me3 | C. elegans | 288 | 1-288 | 288 | — |
| 20 | | | | | | (Vielle) | | |
| SET8 | SET1 | — | H4K20me1 | C. elegans | 242 | 1-242 | 242 | — |
| | | | | | | (Vielle) | | |
| SET8 | SETD8 | — | H4K20me1 | H. sapiens | 393 | 185-393 | 209 | 256-382: |
| | | | | | | | (Couture) | SET |
| SET8 | TgSET | — | H4K20me1/ | T. gondii | 1893 | 1590-1893 | 304 | 1749-1884: |
| | 8 | | 2/3 | | | (Sautel) | | SET |

[1023] In some embodiment, the functional domain may be a Histone Methyltransferase (HMT) Recruiter Effector Domain. Preferred examples include those in the Table below, namely Hp1a, PHF19, and NIPP1.

Table of Histone Methyltransferase (HMT) Recruiter Effector Domains

| | | Substrate | Modification | | Full | Selected | | |
|---|---|---|---|---|---|---|---|---|
| Subtype/ | | (if | (if | | size | truncation | Final size | Catalytic |
| Complex | Name | known) | known) | Organism | (aa) | (aa) | (aa) | domain |
| — | Hp1a | — | H3K9me3 | M. | 191 | 73-191 | 119 | 121-179: |
| | | | | musculus | | | (Hathaway) | chromoshadow |
| — | PHF19 | — | H3K27me3 | H. sapiens | 580 | (1-250) + | 335 | 163-250: |
| | | | | | | GGSG | (Ballaré) | PHD2 |
| | | | | | | linker + | | |
| | | | | | | (500-580) | | |
| — | NIPP1 | — | H3K27me3 | H. sapiens | 351 | 1-329 | 329 | 310-329: EED |
| | | | | | | (Jin) | | |

[1024] In some embodiment, the functional domain may be Histone Acetyltransferase Inhibitor Effector Domain. Preferred examples include SET/TAF-1β listed in the Table below.

Table of Histone Acetyltransferase Inhibitor Effector Domains

| | | | Modification | | Full | Selected | Final | |
|---|---|---|---|---|---|---|---|---|
| Subtype/ | | Substrate | (if | | size | truncation | size | Catalytic |
| Complex | Name | (if known) | known) | Organism | (aa) | (aa) | (aa) | domain |
| — | SET/TAF-1β | — | — | M. | 289 | 1-289 | 289 | — |
| | | | | musculus | | (Cervoni) | | |

[1025] It is also preferred to target endogenous (regulatory) control elements (such as enhancers and silencers) in addition to a promoter or promoter-proximal elements. Thus, the invention can also be used to target endogenous control elements (including enhancers and silencers) in addition to targeting of the promoter. These control elements can be located upstream and downstream of the transcriptional start site (TSS), starting from 200 bp from the TSS to 100 kb away. Targeting of known control elements can be used to activate or repress the gene of interest. In some cases, a single control element can influence the transcription of multiple target genes. Targeting of a single control element could therefore be used to control the transcription of multiple genes simultaneously.

[1026] Targeting of putative control elements on the other hand (e.g. by tiling the region of the putative control element as well as 200 bp up to 100 kB around the element) can be used as a means to verify such elements (by measuring the transcription of the gene of interest) or to detect novel control elements (e.g. by tiling 100 kb upstream and downstream of the TSS of the gene of interest). In addition, targeting of putative control elements can be useful in the context of understanding genetic causes of disease. Many mutations and common SNP variants associated with disease phenotypes are located outside coding regions. Targeting of such regions with either the activation or repression systems described herein can be followed by readout of transcription of either a) a set of putative targets (e.g. a set of genes located in closest proximity to the control element) or b) whole-transcriptome readout by e.g. RNAseq or microarray. This would allow for the identification of likely candidate genes involved in the disease phenotype. Such candidate genes could be useful as novel drug targets.

[1027] Histone acetyltransferase (HAT) inhibitors are mentioned herein. However, an alternative in some embodiments is for the one or more functional domains to comprise an acetyltransferase, preferably a histone acetyltransferase. These are useful in the field of epigenomics, for example in methods of interrogating the epigenome. Methods of interrogating the epigenome may include, for example, targeting epigenomic sequences. Targeting epigenomic sequences may include the guide being directed to an epigenomic target sequence. Epigenomic target sequence may include, in some embodiments, include a promoter, silencer or an enhancer sequence.

[1028] Use of a functional domain linked to a Cpf1 effector protein as described herein, preferably a dead-Cpf1 effector protein, more preferably a dead-FnCpf1 effector protein, to target epigenomic sequences can be used to activate or repress promoters, silencer or enhancers.

[1029] Examples of acetyltransferases are known but may include, in some embodiments, histone acetyltransferases. In some embodiments, the histone acetyltransferase may comprise the catalytic core of the human acetyltransferase p300 (Gerbasch & Reddy, Nature Biotech 6 Apr. 2015).

[1030] In some preferred embodiments, the functional domain is linked to a dead-Cpf1 effector protein to target and activate epigenomic sequences such as promoters or enhancers. One or more guides directed to such promoters or enhancers may also be provided to direct the binding of the CRISPR enzyme to such promoters or enhancers.

[1031] The term “associated with” is used here in relation to the association of the functional domain to the Cpf1 effector protein or the adaptor protein. It is used in respect of how one molecule ‘associates’ with respect to another, for example between an adaptor protein and a functional domain, or between the Cpf1 effector protein and a functional domain. In the case of such protein-protein interactions, this association may be viewed in terms of recognition in the way an antibody recognizes an epitope. Alternatively, one protein may be associated with another protein via a fusion of the two, for instance one subunit being fused to another subunit. Fusion typically occurs by addition of the amino acid sequence of one to that of the other, for instance via splicing together of the nucleotide sequences that encode each protein or subunit. Alternatively, this may essentially be viewed as binding between two molecules or direct linkage, such as a fusion protein. In any event, the fusion protein may include a linker between the two subunits of interest (i.e. between the enzyme and the functional domain or between the adaptor protein and the functional domain). Thus, in some embodiments, the Cpf1 effector protein or adaptor protein is associated with a functional domain by binding thereto. In other embodiments, the Cpf1 effector protein or adaptor protein is associated with a functional domain because the two are fused together, optionally via an intermediate linker.

[1032] Attachment of a functional domain or fusion protein can be via a linker, e.g., a flexible glycine-serine (GlyGlyGlySer) or (GGGS)₃ or a rigid alpha-helical linker such as (Ala(GluAlaAlaAlaLys)Ala). Linkers such as (GGGGS)₃ are preferably used herein to separate protein or peptide domains. (GGGGS)₃ is preferable because it is a relatively long linker (15 amino acids). The glycine residues are the most flexible and the serine residues enhance the chance that the linker is on the outside of the protein. (GGGGS)₆ (GGGGS)₉ or (GGGGS)₁₂ may preferably be used as alternatives. Other preferred alternatives are (GGGGS)₁, (GGGGS)₂, (GGGGS)₄, (GGGGS)₅, (GGGGS)₇, (GGGGS)₈, (GGGGS)₁₀, or (GGGGS)₁₁. Alternative linkers are available, but highly flexible linkers are thought to work best to allow for maximum opportunity for the 2 parts of the Cpf1 to come together and thus reconstitute Cpf1 activity. One alternative is that the NLS of nucleoplasmin can be used as a linker. For example, a linker can also be used between the Cpf1 and any functional domain. Again, a (GGGGS)₃ linker may be used here (or the 6, 9, or 12 repeat versions therefore) or the NLS of nucleoplasmin can be used as a linker between Cpf1 and the functional domain.

### Saturating Mutagenesis

[1033] The Cpf1 effector protein system(s) described herein can be used to perform saturating or deep scanning mutagenesis of genomic loci in conjunction with a cellular phenotype—for instance, for determining critical minimal features and discrete vulnerabilities of functional elements required for gene expression, drug resistance, and reversal of disease. By saturating or deep scanning mutagenesis is meant that every or essentially every DNA base is cut within the genomic loci. A library of Cpf1 effector protein guide RNAs may be introduced into a population of cells. The library may be introduced, such that each cell receives a single guide RNA (gRNA). In the case where the library is introduced by transduction of a viral vector, as described herein, a low multiplicity of infection (MOI) is used. The library may include gRNAs targeting every sequence upstream of a (protospacer adjacent motif) (PAM) sequence in a genomic locus. The library may include at least 100 non-overlapping genomic sequences upstream of a PAM sequence for every 1000 base pairs within the genomic locus. The library may include gRNAs targeting sequences upstream of at least one different PAM sequence. The Cpf1 effector protein systems may include more than one Cpf1 protein. Any Cpf1 effector protein as described herein, including orthologues or engineered Cpf1 effector proteins that recognize different PAM sequences may be used. The frequency of off target sites for a gRNA may be less than 500. Off target scores may be generated to select gRNAs with the lowest off target sites. Any phenotype determined to be associated with cutting at a gRNA target site may be confirmed by using gRNAs targeting the same site in a single experiment. Validation of a target site may also be performed by using a modified Cpf1 effector protein, as described herein, and two gRNAs targeting the genomic site of interest. Not being bound by a theory, a target site is a true hit if the change in phenotype is observed in validation experiments.

[1034] The genomic loci may include at least one continuous genomic region. The at least one continuous genomic region may comprise up to the entire genome. The at least one continuous genomic region may comprise a functional element of the genome. The functional element may be within a non-coding region, coding gene, intronic region, promoter, or enhancer. The at least one continuous genomic region may comprise at least 1 kb, preferably at least 50 kb of genomic DNA. The at least one continuous genomic region may comprise a transcription factor binding site. The at least one continuous genomic region may comprise a region of DNase I hypersensitivity. The at least one continuous genomic region may comprise a transcription enhancer or repressor element. The at least one continuous genomic region may comprise a site enriched for an epigenetic signature. The at least one continuous genomic DNA region may comprise an epigenetic insulator. The at least one continuous genomic region may comprise two or more continuous genomic regions that physically interact. Genomic regions that interact may be determined by ‘4C technology’. 4C technology allows the screening of the entire genome in an unbiased manner for DNA segments that physically interact with a DNA fragment of choice, as is described in Zhao et al. ((2006) Nat Genet 38, 1341-7) and in U.S. Pat. No. 8,642,295, both incorporated herein by reference in its entirety. The epigenetic signature may be histone acetylation, histone methylation, histone ubiquitination, histone phosphorylation, DNA methylation, or a lack thereof

[1035] The Cpf1 effector protein system(s) for saturating or deep scanning mutagenesis can be used in a population of cells. The Cpf1 effector protein system(s) can be used in eukaryotic cells, including but not limited to mammalian and plant cells. The population of cells may be prokaryotic cells. The population of eukaryotic cells may be a population of embryonic stem (ES) cells, neuronal cells, epithelial cells, immune cells, endocrine cells, muscle cells, erythrocytes, lymphocytes, plant cells, or yeast cells.

[1036] In one aspect, the present invention provides for a method of screening for functional elements associated with a change in a phenotype. The library may be introduced into a population of cells that are adapted to contain a Cpf1 effector protein. The cells may be sorted into at least two groups based on the phenotype. The phenotype may be expression of a gene, cell growth, or cell viability. The relative representation of the guide RNAs present in each group are determined, whereby genomic sites associated with the change in phenotype are determined by the representation of guide RNAs present in each group. The change in phenotype may be a change in expression of a gene of interest. The gene of interest may be upregulated, downregulated, or knocked out. The cells may be sorted into a high expression group and a low expression group. The population of cells may include a reporter construct that is used to determine the phenotype. The reporter construct may include a detectable marker. Cells may be sorted by use of the detectable marker.

[1037] In another aspect, the present invention provides for a method of screening for genomic sites associated with resistance to a chemical compound. The chemical compound may be a drug or pesticide. The library may be introduced into a population of cells that are adapted to contain a Cpf1 effector protein, wherein each cell of the population contains no more than one guide RNA; the population of cells are treated with the chemical compound; and the representation of guide RNAs are determined after treatment with the chemical compound at a later time point as compared to an early time point, whereby genomic sites associated with resistance to the chemical compound are determined by enrichment of guide RNAs. Representation of gRNAs may be determined by deep sequencing methods.

[1038] Useful in the practice of the instant invention utilizing Cpf1 effector protein complexes are methods used in CRISPR-Cas9 systems and reference is made to the article entitled BCL11A enhancer dissection by Cas9-mediated in situ saturating mutagenesis. Canver, M. C., Smith, E. C., Sher, F., Pinello, L., Sanjana, N. E., Shalem, O., Chen, D. D., Schupp, P. G., Vinjamur, D. S., Garcia, S. P., Luc, S., Kurita, R., Nakamura, Y., Fujiwara, Y., Maeda, T., Yuan, G., Zhang, F., Orkin, S. H., & Bauer, D. E. DOI:10.1038/nature15521, published online Sep. 16, 2015, the article is herein incorporated by reference and discussed briefly below:

[1039] Canver et al. involves novel pooled CRISPR-Cas9 guide RNA libraries to perform in situ saturating mutagenesis of the human and mouse BCL11A erythroid enhancers previously identified as an enhancer associated with fetal hemoglobin (HbF) level and whose mouse ortholog is necessary for erythroid BCL11A expression. This approach revealed critical minimal features and discrete vulnerabilities of these enhancers. Through editing of primary human progenitors and mouse transgenesis, the authors validated the BCL11A erythroid enhancer as a target for HbF reinduction. The authors generated a detailed enhancer map that informs therapeutic genome editing.

### Method of Using Cpf1 Systems to Modify a Cell or Oganism

[1040] The invention in some embodiments comprehends a method of modifying an cell or organism. The cell may be a prokaryotic cell or a eukaryotic cell. The cell may be a mammalian cell. The mammalian cell many be a non-human primate, bovine, porcine, rodent or mouse cell. The cell may be a non-mammalian eukaryotic cell such as poultry, fish or shrimp. The cell may also be a plant cell. The plant cell may be of a crop plant such as cassava, corn, sorghum, wheat, or rice. The plant cell may also be of an algae, tree or vegetable. The modification introduced to the cell by the present invention may be such that the cell and progeny of the cell are altered for improved production of biologic products such as an antibody, starch, alcohol or other desired cellular output. The modification introduced to the cell by the present invention may be such that the cell and progeny of the cell include an alteration that changes the biologic product produced.

[1041] The system may comprise one or more different vectors. In an aspect of the invention, the Cas protein is codon optimized for expression the desired cell type, preferentially a eukaryotic cell, preferably a mammalian cell or a human cell.

[1042] Packaging cells are typically used to form virus particles that are capable of infecting a host cell. Such cells include 293 cells, which package adenovirus, and ψ2 cells or PA317 cells, which package retrovirus. Viral vectors used in gene therapy are usually generated by producing a cell line that packages a nucleic acid vector into a viral particle. The vectors typically contain the minimal viral sequences required for packaging and subsequent integration into a host, other viral sequences being replaced by an expression cassette for the polynucleotide(s) to be expressed. The missing viral functions are typically supplied in trans by the packaging cell line. For example, AAV vectors used in gene therapy typically only possess ITR sequences from the AAV genome which are required for packaging and integration into the host genome. Viral DNA is packaged in a cell line, which contains a helper plasmid encoding the other AAV genes, namely rep and cap, but lacking ITR sequences. The cell line may also be infected with adenovirus as a helper. The helper virus promotes replication of the AAV vector and expression of AAV genes from the helper plasmid. The helper plasmid is not packaged in significant amounts due to a lack of ITR sequences. Contamination with adenovirus can be reduced by, e.g., heat treatment to which adenovirus is more sensitive than AAV.

### Delivery

[1043] The invention involves at least one component of the CRISPR complex, e.g., RNA, delivered via at least one nanoparticle complex. In some aspects, the invention provides methods comprising delivering one or more polynucleotides, such as or one or more vectors as described herein, one or more transcripts thereof, and/or one or proteins transcribed therefrom, to a host cell. In some aspects, the invention further provides cells produced by such methods, and animals comprising or produced from such cells. In some embodiments, a CRISPR enzyme in combination with (and optionally complexed with) a guide sequence is delivered to a cell. Conventional viral and non-viral based gene transfer methods can be used to introduce nucleic acids in mammalian cells or target tissues. Such methods can be used to administer nucleic acids encoding components of a CRISPR system to cells in culture, or in a host organism. Non-viral vector delivery systems include DNA plasmids, RNA (e.g. a transcript of a vector described herein), naked nucleic acid, and nucleic acid complexed with a delivery vehicle, such as a liposome. Viral vector delivery systems include DNA and RNA viruses, which have either episomal or integrated genomes after delivery to the cell. For a review of gene therapy procedures, see Anderson, Science 256:808-813 (1992); Nabel & Felgner, TIBTECH 11:211-217 (1993); Mitani & Caskey, TIBTECH 11:162-166 (1993); Dillon, TIBTECH 11:167-175 (1993); Miller, Nature 357:455-460 (1992); Van Brunt, Biotechnology 6(10):1149-1154 (1988); Vigne, Restorative Neurology and Neuroscience 8:35-36 (1995); Kremer & Perricaudet, British Medical Bulletin 51(1):31-44 (1995); Haddada et al., in Current Topics in Microbiology and Immunology Doerfler and Bohm (eds) (1995); and Yu et al., Gene Therapy 1:13-26 (1994).

[1044] Methods of non-viral delivery of nucleic acids include lipofection, microinjection, biolistics, virosomes, liposomes, immunoliposomes, polycation or lipid:nucleic acid conjugates, naked DNA, artificial virions, and agent-enhanced uptake of DNA. Lipofection is described in e.g., U.S. Pat. Nos. 5,049,386, 4,946,787; and 4,897,355) and lipofection reagents are sold commercially (e.g., Transfectam™ and Lipofectin™). Cationic and neutral lipids that are suitable for efficient receptor-recognition lipofection of polynucleotides include those of Felgner, WO 91/17424; WO 91/16024. Delivery can be to cells (e.g. in vitro or ex vivo administration) or target tissues (e.g. in vivo administration).

[1045] The preparation of lipid:nucleic acid complexes, including targeted liposomes such as immunolipid complexes, is well known to one of skill in the art (see, e.g., Crystal, Science 270:404-410 (1995); Blaese et al., Cancer Gene Ther. 2:291-297 (1995); Behr et al., Bioconjugate Chem. 5:382-389 (1994); Remy et al., Bioconjugate Chem. 5:647-654 (1994); Gao et al., Gene Therapy 2:710-722 (1995); Ahmad et al., Cancer Res. 52:4817-4820 (1992); U.S. Pat. Nos. 4,186,183, 4,217,344, 4,235,871, 4,261,975, 4,485,054, 4,501,728, 4,774,085, 4,837,028, and 4,946,787).

[1046] The use of RNA or DNA viral based systems for the delivery of nucleic acids take advantage of highly evolved processes for targeting a virus to specific cells in the body and trafficking the viral payload to the nucleus. Viral vectors can be administered directly to patients (in vivo) or they can be used to treat cells in vitro, and the modified cells may optionally be administered to patients (ex vivo). Conventional viral based systems could include retroviral, lentivirus, adenoviral, adeno-associated and herpes simplex virus vectors for gene transfer. Integration in the host genome is possible with the retrovirus, lentivirus, and adeno-associated virus gene transfer methods, often resulting in long term expression of the inserted transgene. Additionally, high transduction efficiencies have been observed in many different cell types and target tissues.

[1047] The tropism of a retrovirus can be altered by incorporating foreign envelope proteins, expanding the potential target population of target cells. Lentiviral vectors are retroviral vectors that are able to transduce or infect non-dividing cells and typically produce high viral titers. Selection of a retroviral gene transfer system would therefore depend on the target tissue. Retroviral vectors are comprised of cis-acting long terminal repeats with packaging capacity for up to 6-10 kb of foreign sequence. The minimum cis-acting LTRs are sufficient for replication and packaging of the vectors, which are then used to integrate the therapeutic gene into the target cell to provide permanent transgene expression. Widely used retroviral vectors include those based upon murine leukemia virus (MuLV), gibbon ape leukemia virus (GaLV), Simian Immuno deficiency virus (SIV), human immuno deficiency virus (HIV), and combinations thereof (see, e.g., Buchscher et al., J. Virol. 66:2731-2739 (1992); Johann et al., J. Virol. 66:1635-1640 (1992); Sommnerfelt et al., Virol. 176:58-59 (1990); Wilson et al., J. Virol. 63:2374-2378 (1989); Miller et al., J. Virol. 65:2220-2224 (1991); PCT/US94/05700).

[1048] In another embodiment, Cocal vesiculovirus envelope pseudotyped retroviral vector particles are contemplated (see, e.g., US Patent Publication No. 20120164118 assigned to the Fred Hutchinson Cancer Research Center). Cocal virus is in the Vesiculovirus genus, and is a causative agent of vesicular stomatitis in mammals. Cocal virus was originally isolated from mites in Trinidad (Jonkers et al., Am. J. Vet. Res. 25:236-242 (1964)), and infections have been identified in Trinidad, Brazil, and Argentina from insects, cattle, and horses. Many of the vesiculoviruses that infect mammals have been isolated from naturally infected arthropods, suggesting that they are vector-borne. Antibodies to vesiculoviruses are common among people living in rural areas where the viruses are endemic and laboratory-acquired; infections in humans usually result in influenza-like symptoms. The Cocal virus envelope glycoprotein shares 71.5% identity at the amino acid level with VSV-G Indiana, and phylogenetic comparison of the envelope gene of vesiculoviruses shows that Cocal virus is serologically distinct from, but most closely related to, VSV-G Indiana strains among the vesiculoviruses. Jonkers et al., Am. J. Vet. Res. 25:236-242 (1964) and Travassos da Rosa et al., Am. J. Tropical Med. & Hygiene 33:999-1006 (1984). The Cocal vesiculovirus envelope pseudotyped retroviral vector particles may include for example, lentiviral, alpharetroviral, betaretroviral, gammaretroviral, deltaretroviral, and epsilonretroviral vector particles that may comprise retroviral Gag, Pol, and/or one or more accessory protein(s) and a Cocal vesiculovirus envelope protein. Within certain aspects of these embodiments, the Gag, Pol, and accessory proteins are lentiviral and/or gammaretroviral. The invention provides AAV that contains or consists essentially of an exogenous nucleic acid molecule encoding a CRISPR system, e.g., a plurality of cassettes comprising or consisting a first cassette comprising or consisting essentially of a promoter, a nucleic acid molecule encoding a CRISPR-associated (Cas) protein (putative nuclease or helicase proteins), e.g., Cpf1 and a terminator, and a two, or more, advantageously up to the packaging size limit of the vector, e.g., in total (including the first cassette) five, cassettes comprising or consisting essentially of a promoter, nucleic acid molecule encoding guide RNA (gRNA) and a terminator (e.g., each cassette schematically represented as Promoter-gRNA1-terminator, Promoter-gRNA2-terminator . . . Promoter-gRNA(N)-terminator (where N is a number that can be inserted that is at an upper limit of the packaging size limit of the vector), or two or more individual rAAVs, each containing one or more than one cassette of a CRISPR system, e.g., a first rAAV containing the first cassette comprising or consisting essentially of a promoter, a nucleic acid molecule encoding Cas, e.g., Cas (Cpf1) and a terminator, and a second rAAV containing a plurality, four, cassettes comprising or consisting essentially of a promoter, nucleic acid molecule encoding guide RNA (gRNA) and a terminator (e.g., each cassette schematically represented as Promoter-gRNA1-terminator, Promoter-gRNA2-terminator . . . Promoter-gRNA(N)-terminator (where N is a number that can be inserted that is at an upper limit of the packaging size limit of the vector). As rAAV is a DNA virus, the nucleic acid molecules in the herein discussion concerning AAV or rAAV are advantageously DNA. The promoter is in some embodiments advantageously human Synapsin I promoter (hSyn). Additional methods for the delivery of nucleic acids to cells are known to those skilled in the art. See, for example, US20030087817, incorporated herein by reference.

[1049] In some embodiments, a host cell is transiently or non-transiently transfected with one or more vectors described herein. In some embodiments, a cell is transfected as it naturally occurs in a subject. In some embodiments, a cell that is transfected is taken from a subject. In some embodiments, the cell is derived from cells taken from a subject, such as a cell line. A wide variety of cell lines for tissue culture are known in the art. Examples of cell lines include, but are not limited to, C8161, CCRF-CEM, MOLT, mIMCD-3, NHDF, HeLa-S3, Huh1, Huh4, Huh7, HUVEC, HASMC, HEKn, HEKa, MiaPaCell, Panc1, PC-3, TF1, CTLL-2, C1R, Rat6, CV1, RPTE, A10, T24, J82, A375, ARH-77, Calu1, SW480, SW620, SKOV3, SK-UT, CaCo2, P388D1, SEM-K2, WEHI-231, HB56, TIB55, Jurkat, J45.01, LRMB, Bcl-1, BC-3, IC21, DLD2, Raw264.7, NRK, NRK-52E, MRC5, MEF, Hep G2, HeLa B, HeLa T4, COS, COS-1, COS-6, COS-M6A, BS-C-1 monkey kidney epithelial, BALB/3T3 mouse embryo fibroblast, 3T3 Swiss, 3T3-L1, 132-d5 human fetal fibroblasts; 10.1 mouse fibroblasts, 293-T, 3T3, 721, 9L, A2780, A2780ADR, A2780cis, A172, A20, A253, A431, A-549, ALC, B16, B35, BCP-1 cells, BEAS-2B, bEnd.3, BHK-21, BR 293, BxPC3, C3H-10T1/2, C6/36, Cal-27, CHO, CHO-7, CHO-IR, CHO-K1, CHO-K2, CHO-T, CHO Dhfr −/−, COR-L23, COR-L23/CPR, COR-L23/5010, COR-L23/R23, COS-7, COV-434, CML T1, CMT, CT26, D17, DH82, DU145, DuCaP, EL4, EM2, EM3, EMT6/AR1, EMT6/AR10.0, FM3, H1299, H69, HB54, HB55, HCA2, HEK-293, HeLa, Hepa1c1c7, HL-60, HMEC, HT-29, Jurkat, JY cells, K562 cells, Ku812, KCL22, KG1, KYO1, LNCap, Ma-Mel 1-48, MC-38, MCF-7, MCF-10A, MDA-MB-231, MDA-MB-468, MDA-MB-435, MDCK II, MDCK II, MOR/0.2R, MONO-MAC 6, MTD-1A, MyEnd, NCI-H69/CPR, NCI-H69/LX10, NCI-H69/LX20, NCI-H69/LX4, NIH-3T3, NALM-1, NW-145, OPCN/OPCT cell lines, Peer, PNT-1A/PNT 2, RenCa, RIN-5F, RMA/RMAS, Saos-2 cells, Sf-9, SkBr3, T2, T-47D, T84, THP1 cell line, U373, U87, U937, VCaP, Vero cells, WM39, WT-49, X63, YAC-1, YAR, and transgenic varieties thereof. Cell lines are available from a variety of sources known to those with skill in the art (see, e.g., the American Type Culture Collection (ATCC) (Manassas, Va.)). In some embodiments, a cell transfected with one or more vectors described herein is used to establish a new cell line comprising one or more vector-derived sequences. In some embodiments, a cell transiently transfected with the components of a CRISPR system as described herein (such as by transient transfection of one or more vectors, or transfection with RNA), and modified through the activity of a CRISPR complex, is used to establish a new cell line comprising cells containing the modification but lacking any other exogenous sequence. In some embodiments, cells transiently or non-transiently transfected with one or more vectors described herein, or cell lines derived from such cells are used in assessing one or more test compounds.

[1050] In some embodiments, one or more vectors described herein are used to produce a non-human transgenic animal or transgenic plant. In some embodiments, the transgenic animal is a mammal, such as a mouse, rat, or rabbit. Methods for producing transgenic animals and plants are known in the art, and generally begin with a method of cell transfection, such as described herein. In another embodiment, a fluid delivery device with an array of needles (see, e.g., US Patent Publication No. 20110230839 assigned to the Fred Hutchinson Cancer Research Center) may be contemplated for delivery of CRISPR Cas to solid tissue. A device of US Patent Publication No. 20110230839 for delivery of a fluid to a solid tissue may comprise a plurality of needles arranged in an array; a plurality of reservoirs, each in fluid communication with a respective one of the plurality of needles; and a plurality of actuators operatively coupled to respective ones of the plurality of reservoirs and configured to control a fluid pressure within the reservoir. In certain embodiments each of the plurality of actuators may comprise one of a plurality of plungers, a first end of each of the plurality of plungers being received in a respective one of the plurality of reservoirs, and in certain further embodiments the plungers of the plurality of plungers are operatively coupled together at respective second ends so as to be simultaneously depressable. Certain still further embodiments may comprise a plunger driver configured to depress all of the plurality of plungers at a selectively variable rate. In other embodiments each of the plurality of actuators may comprise one of a plurality of fluid transmission lines having first and second ends, a first end of each of the plurality of fluid transmission lines being coupled to a respective one of the plurality of reservoirs. In other embodiments the device may comprise a fluid pressure source, and each of the plurality of actuators comprises a fluid coupling between the fluid pressure source and a respective one of the plurality of reservoirs. In further embodiments the fluid pressure source may comprise at least one of a compressor, a vacuum accumulator, a peristaltic pump, a master cylinder, a microfluidic pump, and a valve. In another embodiment, each of the plurality of needles may comprise a plurality of ports distributed along its length.

[1051] In one aspect, the invention provides for methods of modifying a target polynucleotide in a eukaryotic cell. In some embodiments, the method comprises allowing a nucleic acid-targeting complex to bind to the target polynucleotide to effect cleavage of said target polynucleotide thereby modifying the target polynucleotide, wherein the nucleic acid-targeting complex comprises a nucleic acid-targeting effector protein complexed with a guide RNA hybridized to a target sequence within said target polynucleotide.

[1052] In one aspect, the invention provides a method of modifying expression of a polynucleotide in a eukaryotic cell. In some embodiments, the method comprises allowing a nucleic acid-targeting complex to bind to the polynucleotide such that said binding results in increased or decreased expression of said polynucleotide; wherein the nucleic acid-targeting complex comprises a nucleic acid-targeting effector protein complexed with a guide RNA hybridized to a target sequence within said polynucleotide.

[1053] CRISPR complex components may be delivered by conjugation or association with transport moieties (adapted for example from approaches disclosed in U.S. Pat. Nos. 8,106,022; 8,313,772). Nucleic acid delivery strategies may for example be used to improve delivery of guide RNA, or messenger RNAs or coding DNAs encoding CRISPR complex components. For example, RNAs may incorporate modified RNA nucleotides to improve stability, reduce immunostimulation, and/or improve specificity (see Deleavey, Glen F. et al., 2012, Chemistry & Biology, Volume 19, Issue 8, 937-954; Zalipsky, 1995, Advanced Drug Delivery Reviews 16: 157-182; Caliceti and Veronese, 2003, Advanced Drug Delivery Reviews 55: 1261-1277). Various constructs have been described that may be used to modify nucleic acids, such as gRNAs, for more efficient delivery, such as reversible charge-neutralizing phosphotriester backbone modifications that may be adapted to modify gRNAs so as to be more hydrophobic and non-anionic, thereby improving cell entry (Meade B R et al., 2014, Nature Biotechnology 32, 1256-1261). In further alternative embodiments, selected RNA motifs may be useful for mediating cellular transfection (Magalhães M., et al., Molecular Therapy (2012); 20 3, 616-624). Similarly, aptamers may be adapted for delivery of CRISPR complex components, for example by appending aptamers to gRNAs (Tan W. et al., 2011, Trends in Biotechnology, December 2011, Vol. 29, No. 12).

[1054] In some embodiments, conjugation of triantennary N-acetyl galactosamine (GalNAc) to oligonucleotide components may be used to improve delivery, for example delivery to select cell types, for example hepatocytes (see WO2014118272 incorporated herein by reference; Nair, J K et al., 2014, Journal of the American Chemical Society 136 (49), 16958-16961). This may be is considered to be a sugar-based particle and further details on other particle delivery systems and/or formulations are provided herein. GalNAc can therefore be considered to be a particle in the sense of the other particles described herein, such that general uses and other considerations, for instance delivery of said particles, apply to GalNAc particles as well. A solution-phase conjugation strategy may for example be used to attach triantennary GalNAc clusters (mol. wt. ˜2000) activated as PFP (pentafluorophenyl) esters onto 5′-hexylamino modified oligonucleotides (5′-HA ASOs, mol. wt. ˜8000 Da; Østergaard et al., Bioconjugate Chem., 2015, 26 (8), pp 1451-1455). Similarly, poly(acrylate) polymers have been described for in vivo nucleic acid delivery (see WO2013158141 incorporated herein by reference). In further alternative embodiments, pre-mixing CRISPR nanoparticles (or protein complexes) with naturally occurring serum proteins may be used in order to improve delivery (Akinc A et al, 2010, Molecular Therapy vol. 18 no. 7, 1357-1364).

[1055] Screening techniques are available to identify delivery enhancers, for example by screening chemical libraries (Gilleron J. et al., 2015, Nucl. Acids Res. 43 (16): 7984-8001). Approaches have also been described for assessing the efficiency of delivery vehicles, such as lipid nanoparticles, which may be employed to identify effective delivery vehicles for CRISPR components (see Sahay G. et al., 2013, Nature Biotechnology 31, 653-658).

[1056] In some embodiments, delivery of protein CRISPR components may be facilitated with the addition of functional peptides to the protein, such as peptides that change protein hydrophobicity, for example so as to improve in vivo functionality. CRISPR component proteins may similarly be modified to facilitate subsequent chemical reactions. For example, amino acids may be added to a protein that have a group that undergoes click chemistry (Nikić I. et al., 2015, Nature Protocols 10, 780-791). In embodiments of this kind, the click chemical group may then be used to add a wide variety of alternative structures, such as poly(ethylene glycol) for stability, cell penetrating peptides, RNA aptamers, lipids, or carbohydrates such as GalNAc. In further alternatives, a CRISPR component protein may be modified to adapt the protein for cell entry (see Svensen et al., 2012, Trends in Pharmacological Sciences, Vol. 33, No. 4), for example by adding cell penetrating peptides to the protein (see Kauffman, W. Berkeley et al., 2015, Trends in Biochemical Sciences, Volume 40, Issue 12, 749-764; Koren and Torchilin, 2012, Trends in Molecular Medicine, Vol. 18, No. 7). In further alternative embodiment, patients or subjects may be pre-treated with compounds or formulations that facilitate the later delivery of CRISPR components.

### Cpf1 Effector Protein Complexes can be Used in Plants

[1057] The Cpf1 effector protein system(s) (e.g., single or multiplexed) can be used in conjunction with recent advances in crop genomics. The systems described herein can be used to perform efficient and cost effective plant gene or genome interrogation or editing or manipulation—for instance, for rapid investigation and/or selection and/or interrogations and/or comparison and/or manipulations and/or transformation of plant genes or genomes; e.g., to create, identify, develop, optimize, or confer trait(s) or characteristic(s) to plant(s) or to transform a plant genome. There can accordingly be improved production of plants, new plants with new combinations of traits or characteristics or new plants with enhanced traits. The Cpf1 effector protein system(s) can be used with regard to plants in Site-Directed Integration (SDI) or Gene Editing (GE) or any Near Reverse Breeding (NRB) or Reverse Breeding (RB) techniques. Aspects of utilizing the herein described Cpf1 effector protein systems may be analogous to the use of the CRISPR-Cas (e.g. CRISPR-Cas9) system in plants, and mention is made of the University of Arizona web site “CRISPR-PLANT” (http://www.genome.arizona.edu/crispr/) (supported by Penn State and AGI). Embodiments of the invention can be used in genome editing in plants or where RNAi or similar genome editing techniques have been used previously; see, e.g., Nekrasov, “Plant genome editing made easy: targeted mutagenesis in model and crop plants using the CRISPR-Cas system,” Plant Methods 2013, 9:39 (doi:10.1186/1746-4811-9-39); Brooks, “Efficient gene editing in tomato in the first generation using the CRISPR-Cas9 system,” Plant Physiology September 2014 pp 114.247577; Shan, “Targeted genome modification of crop plants using a CRISPR-Cas system,” Nature Biotechnology 31, 686-688 (2013); Feng, “Efficient genome editing in plants using a CRISPR/Cas system,” Cell Research (2013) 23:1229-1232. doi:10.1038/cr.2013.114; published online 20 Aug. 2013; Xie, “RNA-guided genome editing in plants using a CRISPR-Cas system,” Mol Plant. 2013 November; 6(6):1975-83. doi: 10.1093/mp/sst119. Epub 2013 Aug. 17; Xu, “Gene targeting using the Agrobacterium tumefaciens-mediated CRISPR-Cas system in rice,” Rice 2014, 7:5 (2014), Zhou et al., “Exploiting SNPs for biallelic CRISPR mutations in the outcrossing woody perennial Populus reveals 4-coumarate: CoA ligase specificity and Redundancy,” New Phytologist (2015) (Forum) 1-4 (available online only at www.newphytologist.com); Caliando et al, “Targeted DNA degradation using a CRISPR device stably carried in the host genome, NATURE COMMUNICATIONS 6:6989, DOI: 10.1038/ncomms7989, www.nature.com/naturecommunications DOI: 10.1038/ncomms7989; U.S. Pat. No. 6,603,061—Agrobacterium-Mediated Plant Transformation Method; U.S. Pat. No. 7,868,149—Plant Genome Sequences and Uses Thereof and US 2009/0100536—Transgenic Plants with Enhanced Agronomic Traits, all the contents and disclosure of each of which are herein incorporated by reference in their entirety. In the practice of the invention, the contents and disclosure of Morrell et al “Crop genomics: advances and applications,” Nat Rev Genet. 2011 Dec. 29; 13(2): 85-96; each of which is incorporated by reference herein including as to how herein embodiments may be used as to plants. Accordingly, reference herein to animal cells may also apply, mutatis mutandis, to plant cells unless otherwise apparent; and, the enzymes herein having reduced off-target effects and systems employing such enzymes can be used in plant applications, including those mentioned herein.

### Application of Cpf1-CRISPR System to Plants and Yeast

### DEFINITIONS

[1058] In general, the term “plant” relates to any various photosynthetic, eukaryotic, unicellular or multicellular organism of the kingdom Plantae characteristically growing by cell division, containing chloroplasts, and having cell walls comprised of cellulose. The term plant encompasses monocotyledonous and dicotyledonous plants. Specifically, the plants are intended to comprise without limitation angiosperm and gymnosperm plants such as acacia, alfalfa, amaranth, apple, apricot, artichoke, ash tree, asparagus, avocado, banana, barley, beans, beet, birch, beech, blackberry, blueberry, broccoli, Brussel's sprouts, cabbage, canola, cantaloupe, carrot, cassava, cauliflower, cedar, a cereal, celery, chestnut, cherry, Chinese cabbage, citrus, clementine, clover, coffee, corn, cotton, cowpea, cucumber, cypress, eggplant, elm, endive, eucalyptus, fennel, figs, fir, geranium, grape, grapefruit, groundnuts, ground cherry, gum hemlock, hickory, kale, kiwifruit, kohlrabi, larch, lettuce, leek, lemon, lime, locust, pine, maidenhair, maize, mango, maple, melon, millet, mushroom, mustard, nuts, oak, oats, oil palm, okra, onion, orange, an ornamental plant or flower or tree, papaya, palm, parsley, parsnip, pea, peach, peanut, pear, peat, pepper, persimmon, pigeon pea, pine, pineapple, plantain, plum, pomegranate, potato, pumpkin, radicchio, radish, rapeseed, raspberry, rice, rye, sorghum, safflower, sallow, soybean, spinach, spruce, squash, strawberry, sugar beet, sugarcane, sunflower, sweet potato, sweet corn, tangerine, tea, tobacco, tomato, trees, triticale, turf grasses, turnips, vine, walnut, watercress, watermelon, wheat, yams, yew, and zucchini. The term plant also encompasses Algae, which are mainly photoautotrophs unified primarily by their lack of roots, leaves and other organs that characterize higher plants.

[1059] The methods for genome editing using the Cpf1 system as described herein can be used to confer desired traits on essentially any plant. A wide variety of plants and plant cell systems may be engineered for the desired physiological and agronomic characteristics described herein using the nucleic acid constructs of the present disclosure and the various transformation methods mentioned above. In preferred embodiments, target plants and plant cells for engineering include, but are not limited to, those monocotyledonous and dicotyledonous plants, such as crops including grain crops (e.g., wheat, maize, rice, millet, barley), fruit crops (e.g., tomato, apple, pear, strawberry, orange), forage crops (e.g., alfalfa), root vegetable crops (e.g., carrot, potato, sugar beets, yarn), leafy vegetable crops (e.g lettuce, spinach); flowering plants e.g., petunia, rose, chrysanthemum), conifers and pine trees (pine fir, spruce); plants used in phytoremediation (e.g., heavy metal accumulating plants); oil crops (e.g., sunflower, rape seed) and plants used for experimental purposes (e.g. Arabidopsis). Thus, the methods and CRISPR-Cas systems can be used over a broad range of plants, such as for example with dicotyledonous plants belonging to the orders Magniolales, Illiciales, Laurales, Piperales, Aristochiales, Nymphaeales, Ranunculales, Papeverales, Sarraceniaceae, Trochodendrales, Hamamelidales, Eucomiales, Leitneriales, Myricales, Fagales, Casuarinales, Caryophyllales, Batales, Polygonales, Plumbaginales, Dilleniales, Theales, Malvales, Urticales. Lecythidales, Violales, Salicales, Capparales, Ericales, Diapensales, Ebenales, Primulales, Rosales, Fabales, Podostemales, Haloragales, Myrtales, Cornales, Proteales, San tales, Raftlesiales, Celastrales, Euphorhiales, Rhamnales, Sapindales, Juglandales, Geraniales, Polygalales, Umbeltales, Gentianales, Polemoniales, Lamiales, Plantaginales, Scrophulariales, Campanulales, Rubiales, Dipsacales, and Asterales; the methods and CRISPR-Cas systems can be used with monocotyledonous plants such as those belonging to the orders Alismatales, Hydrocharitales, Najadales, Triuridales, Commelinales, Eriocaulales, Restionales, Poales, Juncales, Cyperales, Typhales, Bromeliales, Zingiberales, Arecales, Cyclanthales, Pandanales, Arales, Lilliales, and Orchid ales, or with plants belonging to Gymnospermae, e.g those belonging to the orders Pinales, Ginkgoales, Cycadales, Araucariales, Cupressales and Gnetales.

[1060] The Cpf1 CRISPR systems and methods of use described herein can be used over a broad range of plant species, included in the non-limitative list of dicot, monocot or gymnosperm genera hereunder: Atropa, Alseodaphne, Anacardium, Arachis, Beilschmiedia, Brassica, Carthamus, Coccuhis, Croton, Cucumis, Citrus, Citrullus, Capsicum, Catharanthus, Cocos, Coffea, Cucurbita, amens, Duguetia, Eschscholzia, Ficus, Fragaria, Glaucium, Glycine, Gossypium, Helianthus, Hevea, Hyoscyamus, Lactuca, Landolphia, Linum, Litsea, Lycopersicon, Lupinus, Manihot, Majorana, Malus, Medicago, Nicotiana, Olea, Parthenium, Papaver, Persea, Phaseolus, Pistacia, Pisum, Pyrus, Prunus, Raphanus, Ricinus, Senecio, Sinomenium, Stephania, Sinapis, Solamum, Theobroma, Trifolium, Trigonella, Vicia, Vinca, Vilis, and Vigna; and the genera Allium, Andropogon, Aragrostis, Asparagus, Avena, Cynodon, Festuca, Festulolium, Heterocallis, Hordeum, Lemna, Lolium, Musa, Oryza, Panicum, Pannesetum, Phleum, Poa, Secale, Sorghum, Triticum, Zea, Abies, Cunninghamia, Ephedra, Picea, Pinus, and Pseudotsuga.

[1061] The Cpf1 CRISPR systems and methods of use can also be used over a broad range of “algae” or “algae cells”; including for example algea selected from several eukaryotic phyla, including the Rhodophyta (red algae), Chlorophyta (green algae), Phaeophyta (brown algae), Bacillariophyta (diatoms), Eustigmatophyta and dinoflagellates as well as the prokaryotic phylum Cyanobacteria (blue-green algae). The term “algae” includes for example algae selected from: Amphora, Anabaena, Anikstrodesmis, Botryococcus, Chaetoceros, Chlamydomonas, Chlorella, Chlorococcum, Cyclotella, Cylindrotheca, Dunaliella, Emiliana, Euglena, Hematococcus, Isochrysis, Monochrysis, Monoraphidium, Nannochloris, Nannnochloropsis, Navicula, Nephrochloris, Nephroselmis, Nitzschia, Nodularia, Nostoc, Oochromonas, Oocystis, Osciliartoria, Pavlova, Phaeodactylum, Playtmonas, Pleurochrysis, Porhyra, Pseudoanabaena, Pyramimonas, Stichococcus, Synechococcus, Synechocystis, Tetraselmis, Thalassiosira, and Trichodesmium.

[1062] A part of a plant, i.e., a “plant tissue” may be treated according to the methods of the present invention to produce an improved plant. Plant tissue also encompasses plant cells. The term “plant cell” as used herein refers to individual units of a living plant, either in an intact whole plant or in an isolated form grown in in vitro tissue cultures, on media or agar, in suspension in a growth media or buffer or as a part of higher organized unites, such as, for example, plant tissue, a plant organ, or a whole plant.

[1063] A “protoplast” refers to a plant cell that has had its protective cell wall completely or partially removed using, for example, mechanical or enzymatic means resulting in an intact biochemical competent unit of living plant that can reform their cell wall, proliferate and regenerate grow into a whole plant under proper growing conditions.

[1064] The term “transformation” broadly refers to the process by which a plant host is genetically modified by the introduction of DNA by means of Agrobacteria or one of a variety of chemical or physical methods. As used herein, the term “plant host” refers to plants, including any cells, tissues, organs, or progeny of the plants. Many suitable plant tissues or plant cells can be transformed and include, but are not limited to, protoplasts, somatic embryos, pollen, leaves, seedlings, stems, calli, stolons, microtubers, and shoots. A plant tissue also refers to any clone of such a plant, seed, progeny, propagule whether generated sexually or asexually, and descendents of any of these, such as cuttings or seed.

[1065] The term “transformed” as used herein, refers to a cell, tissue, organ, or organism into which a foreign DNA molecule, such as a construct, has been introduced. The introduced DNA molecule may be integrated into the genomic DNA of the recipient cell, tissue, organ, or organism such that the introduced DNA molecule is transmitted to the subsequent progeny. In these embodiments, the “transformed” or “transgenic” cell or plant may also include progeny of the cell or plant and progeny produced from a breeding program employing such a transformed plant as a parent in a cross and exhibiting an altered phenotype resulting from the presence of the introduced DNA molecule. Preferably, the transgenic plant is fertile and capable of transmitting the introduced DNA to progeny through sexual reproduction.

[1066] The term “progeny”, such as the progeny of a transgenic plant, is one that is born of, begotten by, or derived from a plant or the transgenic plant. The introduced DNA molecule may also be transiently introduced into the recipient cell such that the introduced DNA molecule is not inherited by subsequent progeny and thus not considered “transgenic”. Accordingly, as used herein, a “non-transgenic” plant or plant cell is a plant which does not contain a foreign DNA stably integrated into its genome.

[1067] The term “plant promoter” as used herein is a promoter capable of initiating transcription in plant cells, whether or not its origin is a plant cell. Exemplary suitable plant promoters include, but are not limited to, those that are obtained from plants, plant viruses, and bacteria such as Agrobacterium or Rhizobium which comprise genes expressed in plant cells.

[1068] As used herein, a “fungal cell” refers to any type of eukaryotic cell within the kingdom of fungi. Phyla within the kingdom of fungi include Ascomycota, Basidiomycota, Blastocladiomycota, Chytridiomycota, Glomeromycota, Microsporidia, and Neocallimastigomycota. Fungal cells may include yeasts, molds, and filamentous fungi. In some embodiments, the fungal cell is a yeast cell.

[1069] As used herein, the term “yeast cell” refers to any fungal cell within the phyla Ascomycota and Basidiomycota. Yeast cells may include budding yeast cells, fission yeast cells, and mold cells. Without being limited to these organisms, many types of yeast used in laboratory and industrial settings are part of the phylum Ascomycota. In some embodiments, the yeast cell is an S. cerervisiae, Kluyveromyces marxianus, or Issatchenkia orientalis cell. Other yeast cells may include without limitation Candida spp. (e.g., Candida albicans), Yarrowia spp. (e.g., Yarrowia lipolytica), Pichia spp. (e.g., Pichia pastoris), Kluyveromyces spp. (e.g., Kluyveromyces lactis and Kluyveromyces marxianus), Neurospora spp. (e.g., Neurospora crassa), Fusarium spp. (e.g., Fusarium oxysporum), and Issatchenkia spp. (e.g., Issatchenkia orientalis, a.k.a. Pichia kudriavzevii and Candida acidothermophilum). In some embodiments, the fungal cell is a filamentous fungal cell. As used herein, the term “filamentous fungal cell” refers to any type of fungal cell that grows in filaments, i.e., hyphae or mycelia. Examples of filamentous fungal cells may include without limitation Aspergillus spp. (e.g., Aspergillus niger), Trichoderma spp. (e.g., Trichoderma reesei), Rhizopus spp. (e.g., Rhizopus oryzae), and Mortierella spp. (e.g., Mortierella isabellina).

[1070] In some embodiments, the fungal cell is an industrial strain. As used herein, “industrial strain” refers to any strain of fungal cell used in or isolated from an industrial process, e.g., production of a product on a commercial or industrial scale. Industrial strain may refer to a fungal species that is typically used in an industrial process, or it may refer to an isolate of a fungal species that may be also used for non-industrial purposes (e.g., laboratory research). Examples of industrial processes may include fermentation (e.g., in production of food or beverage products), distillation, biofuel production, production of a compound, and production of a polypeptide. Examples of industrial strains may include, without limitation, JAY270 and ATCC4124.

[1071] In some embodiments, the fungal cell is a polyploid cell. As used herein, a “polyploid” cell may refer to any cell whose genome is present in more than one copy. A polyploid cell may refer to a type of cell that is naturally found in a polyploid state, or it may refer to a cell that has been induced to exist in a polyploid state (e.g., through specific regulation, alteration, inactivation, activation, or modification of meiosis, cytokinesis, or DNA replication). A polyploid cell may refer to a cell whose entire genome is polyploid, or it may refer to a cell that is polyploid in a particular genomic locus of interest. Without wishing to be bound to theory, it is thought that the abundance of guideRNA may more often be a rate-limiting component in genome engineering of polyploid cells than in haploid cells, and thus the methods using the Cpf1 CRISPRS system described herein may take advantage of using a certain fungal cell type.

[1072] In some embodiments, the fungal cell is a diploid cell. As used herein, a “diploid” cell may refer to any cell whose genome is present in two copies. A diploid cell may refer to a type of cell that is naturally found in a diploid state, or it may refer to a cell that has been induced to exist in a diploid state (e.g., through specific regulation, alteration, inactivation, activation, or modification of meiosis, cytokinesis, or DNA replication). For example, the S. cerevisiae strain S228C may be maintained in a haploid or diploid state. A diploid cell may refer to a cell whose entire genome is diploid, or it may refer to a cell that is diploid in a particular genomic locus of interest. In some embodiments, the fungal cell is a haploid cell. As used herein, a “haploid” cell may refer to any cell whose genome is present in one copy. A haploid cell may refer to a type of cell that is naturally found in a haploid state, or it may refer to a cell that has been induced to exist in a haploid state (e.g., through specific regulation, alteration, inactivation, activation, or modification of meiosis, cytokinesis, or DNA replication). For example, the S. cerevisiae strain S228C may be maintained in a haploid or diploid state. A haploid cell may refer to a cell whose entire genome is haploid, or it may refer to a cell that is haploid in a particular genomic locus of interest.

[1073] As used herein, a “yeast expression vector” refers to a nucleic acid that contains one or more sequences encoding an RNA and/or polypeptide and may further contain any desired elements that control the expression of the nucleic acid(s), as well as any elements that enable the replication and maintenance of the expression vector inside the yeast cell. Many suitable yeast expression vectors and features thereof are known in the art; for example, various vectors and techniques are illustrated in Yeast Protocols, 2nd edition, Xiao, W., ed. (Humana Press, New York, 2007) and Buckholz, R. G. and Gleeson, M. A. (1991) Biotechnology (NY) 9(11): 1067-72. Yeast vectors may contain, without limitation, a centromeric (CEN) sequence, an autonomous replication sequence (ARS), a promoter, such as an RNA Polymerase III promoter, operably linked to a sequence or gene of interest, a terminator such as an RNA polymerase III terminator, an origin of replication, and a marker gene (e.g., auxotrophic, antibiotic, or other selectable markers). Examples of expression vectors for use in yeast may include plasmids, yeast artificial chromosomes, 2μ plasmids, yeast integrative plasmids, yeast replicative plasmids, shuttle vectors, and episomal plasmids.

### Stable Integration of Cpf1 CRISP System Components in the Genome of Plants and Plant Cells

[1074] In particular embodiments, it is envisaged that the polynucleotides encoding the components of the Cpf1 CRISPR system are introduced for stable integration into the genome of a plant cell. In these embodiments, the design of the transformation vector or the expression system can be adjusted depending on for when, where and under what conditions the guide RNA and/or the Cpf1 gene are expressed.

[1075] In particular embodiments, it is envisaged to introduce the components of the Cpf1 CRISPR system stably into the genomic DNA of a plant cell. Additionally or alternatively, it is envisaged to introduce the components of the Cpf1 CRISPR system for stable integration into the DNA of a plant organelle such as, but not limited to a plastid, e mitochondrion or a chloroplast.

[1076] The expression system for stable integration into the genome of a plant cell may contain one or more of the following elements: a promoter element that can be used to express the RNA and/or Cpf1 enzyme in a plant cell; a 5′ untranslated region to enhance expression; an intron element to further enhance expression in certain cells, such as monocot cells; a multiple-cloning site to provide convenient restriction sites for inserting the guide RNA and/or the Cpf1 gene sequences and other desired elements; and a 3′ untranslated region to provide for efficient termination of the expressed transcript.

[1077] The elements of the expression system may be on one or more expression constructs which are either circular such as a plasmid or transformation vector, or non-circular such as linear double stranded DNA.

[1078] In a particular embodiment, a Cpf1 CRISPR expression system comprises at least:
[1079] (a) a nucleotide sequence encoding a guide RNA (gRNA) that hybridizes with a target sequence in a plant, and wherein the guide RNA comprises a guide sequence and a direct repeat sequence, and
[1080] (b) a nucleotide sequence encoding a Cpf1 protein,
   wherein components (a) or (b) are located on the same or on different constructs, and whereby the different nucleotide sequences can be under control of the same or a different regulatory element operable in a plant cell.

[1081] DNA construct(s) containing the components of the Cpf1 CRISPR system, and, where applicable, template sequence may be introduced into the genome of a plant, plant part, or plant cell by a variety of conventional techniques. The process generally comprises the steps of selecting a suitable host cell or host tissue, introducing the construct(s) into the host cell or host tissue, and regenerating plant cells or plants therefrom.

[1082] In particular embodiments, the DNA construct may be introduced into the plant cell using techniques such as but not limited to electroporation, microinjection, aerosol beam injection of plant cell protoplasts, or the DNA constructs can be introduced directly to plant tissue using biolistic methods, such as DNA particle bombardment (see also Fu et al., Transgenic Res. 2000 February; 9(1):11-9). The basis of particle bombardment is the acceleration of particles coated with gene/s of interest toward cells, resulting in the penetration of the protoplasm by the particles and typically stable integration into the genome, (see e.g, Klein et al, Nature (1987), Klein et ah, Bio/Technology (1992), Casas et ah, Proc. Natl. Acad. Sci. USA (1993).).

[1083] In particular embodiments, the DNA constructs containing components of the Cpf1 CRISPR system may be introduced into the plant by Agrobacterium-mediated transformation. The DNA constructs may be combined with suitable T-DNA flanking regions and introduced into a conventional Agrobacterium tumefaciens host vector. The foreign DNA can be incorporated into the genome of plants by infecting the plants or by incubating plant protoplasts with Agrobacterium bacteria, containing one or more Ti (tumor-inducing) plasmids. (see e.g. Fraley et al., (1985), Rogers et al., (1987) and U.S. Pat. No. 5,563,055).

### Plant Promoters

[1084] In order to ensure appropriate expression in a plant cell, the components of the Cpf1 CRISPR system described herein are typically placed under control of a plant promoter, i.e. a promoter operable in plant cells. The use of different types of promoters is envisaged.

[1085] A constitutive plant promoter is a promoter that is able to express the open reading frame (ORF) that it controls in all or nearly all of the plant tissues during all or nearly all developmental stages of the plant (referred to as “constitutive expression”). One non-limiting example of a constitutive promoter is the cauliflower mosaic virus 35S promoter. “Regulated promoter” refers to promoters that direct gene expression not constitutively, but in a temporally- and/or spatially-regulated manner, and includes tissue-specific, tissue-preferred and inducible promoters. Different promoters may direct the expression of a gene in different tissues or cell types, or at different stages of development, or in response to different environmental conditions. In particular embodiments, one or more of the Cpf1 CRISPR components are expressed under the control of a constitutive promoter, such as the cauliflower mosaic virus 35S promoter issue-preferred promoters can be utilized to target enhanced expression in certain cell types within a particular plant tissue, for instance vascular cells in leaves or roots or in specific cells of the seed. Examples of particular promoters for use in the Cpf1 CRISPR system—are found in Kawamata et al., (1997) Plant Cell Physiol 38:792-803; Yamamoto et al., (1997) Plant J 12:255-65; Hire et al, (1992) Plant Mol Biol 20:207-18, Kuster et al, (1995) Plant Mol Biol 29:759-72, and Capana et al., (1994) Plant Mol Biol. 25:681-91.

[1086] Examples of promoters that are inducible and that allow for spatiotemporal control of gene editing or gene expression may use a form of energy. The form of energy may include but is not limited to sound energy, electromagnetic radiation, chemical energy and/or thermal energy. Examples of inducible systems include tetracycline inducible promoters (Tet-On or Tet-Off), small molecule two-hybrid transcription activations systems (FKBP, ABA, etc), or light inducible systems (Phytochrome, LOV domains, or cryptochrome), such as a Light Inducible Transcriptional Effector (LITE) that direct changes in transcriptional activity in a sequence-specific manner. The components of a light inducible system may include a Cpf1 CRISPR enzyme, a light-responsive cytochrome heterodimer (e.g. from Arabidopsis thaliana), and a transcriptional activation/repression domain. Further examples of inducible DNA binding proteins and methods for their use are provided in U.S. 61/736,465 and U.S. 61/721,283, which is hereby incorporated by reference in its entirety.

[1087] In particular embodiments, transient or inducible expression can be achieved by using, for example, chemical-regulated promotors, i.e. whereby the application of an exogenous chemical induces gene expression. Modulating of gene expression can also be obtained by a chemical-repressible promoter, where application of the chemical represses gene expression. Chemical-inducible promoters include, but are not limited to, the maize ln2-2 promoter, activated by benzene sulfonamide herbicide safeners (De Veylder et al., (1997) Plant Cell Physiol 38:568-77), the maize GST promoter (GST-ll-27, WO93/01294), activated by hydrophobic electrophilic compounds used as pre-emergent herbicides, and the tobacco PR-1 a promoter (Ono et al., (2004) Biosci Biotechnol Biochem 68:803-7) activated by salicylic acid. Promoters which are regulated by antibiotics, such as tetracycline-inducible and tetracycline-repressible promoters (Gatz et al., (1991) Mol Gen Genet 227:229-37; U.S. Pat. Nos. 5,814,618 and 5,789,156) can also be used herein.

Translocation to and/or Expression in Specific Plant Organelles

[1088] The expression system may comprise elements for translocation to and/or expression in a specific plant organelle.

### Chloroplast Targeting

[1089] In particular embodiments, it is envisaged that the Cpf1 CRISPR system is used to specifically modify chloroplast genes or to ensure expression in the chloroplast. For this purpose use is made of chloroplast transformation methods or compartimentalization of the Cpf1 CRISPR components to the chloroplast. For instance, the introduction of genetic modifications in the plastid genome can reduce biosafety issues such as gene flow through pollen.

[1090] Methods of chloroplast transformation are known in the art and include Particle bombardment, PEG treatment, and microinjection. Additionally, methods involving the translocation of transformation cassettes from the nuclear genome to the pastid can be used as described in WO2010061186.

[1091] Alternatively, it is envisaged to target one or more of the Cpf1 CRISPR components to the plant chloroplast. This is achieved by incorporating in the expression construct a sequence encoding a chloroplast transit peptide (CTP) or plastid transit peptide, operably linked to the 5′ region of the sequence encoding the Cpf1 protein. The CTP is removed in a processing step during translocation into the chloroplast. Chloroplast targeting of expressed proteins is well known to the skilled artisan (see for instance Protein Transport into Chloroplasts, 2010, Annual Review of Plant Biology, Vol. 61: 157-180). In such embodiments it is also desired to target the guide RNA to the plant chloroplast. Methods and constructs which can be used for translocating guide RNA into the chloroplast by means of a chloroplast localization sequence are described, for instance, in US 20040142476, incorporated herein by reference. Such variations of constructs can be incorporated into the expression systems of the invention to efficiently translocate the Cpf1-guide RNA.

### Introduction of Polynucleotides Encoding the CRISPR-Cpf1 System in Algal Cells.

[1092] Transgenic algae (or other plants such as rape) may be particularly useful in the production of vegetable oils or biofuels such as alcohols (especially methanol and ethanol) or other products. These may be engineered to express or overexpress high levels of oil or alcohols for use in the oil or biofuel industries.

[1093] U.S. Pat. No. 8,945,839 describes a method for engineering Micro-Algae (Chlamydomonas reinhardtii cells) species) using Cas9. Using similar tools, the methods of the Cpf1 CRISPR system described herein can be applied on Chlamydomonas species and other algae. In particular embodiments, Cpf1 and guide RNA are introduced in algae expressed using a vector that expresses Cpf1 under the control of a constitutive promoter such as Hsp70A-Rbc S2 or Beta2-tubulin. Guide RNA is optionally delivered using a vector containing T7 promoter. Alternatively, Cas9 mRNA and in vitro transcribed guide RNA can be delivered to algal cells. Electroporation protocols are available to the skilled person such as the standard recommended protocol from the GeneArt Chlamydomonas Engineering kit.

[1094] In particular embodiments, the endonuclease used herein is a Split Cpf1 enzyme. Split Cpf1 enzymes are preferentially used in Algae for targeted genome modification as has been described for Cas9 in WO 2015086795. Use of the Cpf1 split system is particularly suitable for an inducible method of genome targeting and avoids the potential toxic effect of the Cpf1 overexpression within the algae cell. In particular embodiments, Said Cpf1 split domains (RuvC and HNH domains) can be simultaneously or sequentially introduced into the cell such that said split Cpf1 domain(s) process the target nucleic acid sequence in the algae cell. The reduced size of the split Cpf1 compared to the wild type Cpf1 allows other methods of delivery of the CRISPR system to the cells, such as the use of Cell Penetrating Peptides as described herein. This method is of particular interest for generating genetically modified algae.

### Introduction of Polynucleotides Encoding Cpf1 Components in Yeast Cells

[1095] In particular embodiments, the invention relates to the use of the Cpf1 CRISPR system for genome editing of yeast cells. Methods for transforming yeast cells which can be used to introduce polynucleotides encoding the Cpf1 CRISPR system components are well known to the artisan and are reviewed by Kawai et al., 2010, Bioeng Bugs. 2010 November-December; 1(6): 395-403). Non-limiting examples include transformation of yeast cells by lithium acetate treatment (which may further include carrier DNA and PEG treatment), bombardment or by electroporation.

### Transient Expression of Cpf1 CRISP System Components in Plants and Plant Cell

[1096] In particular embodiments, it is envisaged that the guide RNA and/or Cpf1 gene are transiently expressed in the plant cell. In these embodiments, the Cpf1 CRISPR system can ensure modification of a target gene only when both the guide RNA and the Cpf1 protein is present in a cell, such that genomic modification can further be controlled. As the expression of the Cpf1 enzyme is transient, plants regenerated from such plant cells typically contain no foreign DNA. In particular embodiments the Cpf1 enzyme is stably expressed by the plant cell and the guide sequence is transiently expressed.

[1097] In particular embodiments, the Cpf1 CRISPR system components can be introduced in the plant cells using a plant viral vector (Scholthof et al. 1996, Annu Rev Phytopathol. 1996; 34:299-323). In further particular embodiments, said viral vector is a vector from a DNA virus. For example, geminivirus (e.g., cabbage leaf curl virus, bean yellow dwarf virus, wheat dwarf virus, tomato leaf curl virus, maize streak virus, tobacco leaf curl virus, or tomato golden mosaic virus) or nanovirus (e.g., Faba bean necrotic yellow virus). In other particular embodiments, said viral vector is a vector from an RNA virus. For example, tobravirus (e.g., tobacco rattle virus, tobacco mosaic virus), potexvirus (e.g., potato virus X), or hordeivirus (e.g., barley stripe mosaic virus). The replicating genomes of plant viruses are non-integrative vectors.

[1098] In particular embodiments, the vector used for transient expression of Cpf1 CRISPR constructs is for instance a pEAQ vector, which is tailored for Agrobacterium-mediated transient expression (Sainsbury F, et al., Plant Biotechnol J. 2009 September; 7(7):682-93) in the protoplast. Precise targeting of genomic locations was demonstrated using a modified Cabbage Leaf Curl virus (CaLCuV) vector to express gRNAs in stable transgenic plants expressing a CRISPR enzyme (Scientific Reports 5, Article number: 14926 (2015), doi: 10.1038/srep14926).

[1099] In particular embodiments, double-stranded DNA fragments encoding the guide RNA and/or the Cpf1 gene can be transiently introduced into the plant cell. In such embodiments, the introduced double-stranded DNA fragments are provided in sufficient quantity to modify the cell but do not persist after a contemplated period of time has passed or after one or more cell divisions Methods for direct DNA transfer in plants are known by the skilled artisan (see for instance Davey et al. Plant Mol Biol. 1989 Septemer; 13(3):273-85.)

[1100] In other embodiments, an RNA polynucleotide encoding the Cpf1 protein is introduced into the plant cell, which is then translated and processed by the host cell generating the protein in sufficient quantity to modify the cell (in the presence of at least one guide RNA) but which does not persist after a contemplated period of time has passed or after one or more cell divisions. Methods for introducing mRNA to plant protoplasts for transient expression are known by the skilled artisan (see for instance in Gallie, Plant Cell Reports (1993), 13; 119-122).

[1101] Combinations of the different methods described above are also envisaged.

### Delivery of Cpf1 CRISPR Components to the Plant Cell

[1102] In particular embodiments, it is of interest to deliver one or more components of the Cpf1 CRISPR system directly to the plant cell. This is of interest, inter alia, for the generation of non-transgenic plants (see below). In particular embodiments, one or more of the Cpf1 components is prepared outside the plant or plant cell and delivered to the cell. For instance in particular embodiments, the Cpf1 protein is prepared in vitro prior to introduction to the plant cell. Cpf1 protein can be prepared by various methods known by one of skill in the art and include recombinant production. After expression, the Cpf1 protein is isolated, refolded if needed, purified and optionally treated to remove any purification tags, such as a His-tag. Once crude, partially purified, or more completely purified Cpf1 protein is obtained, the protein may be introduced to the plant cell.

[1103] In particular embodiments, the Cpf1 protein is mixed with guide RNA targeting the gene of interest to form a pre-assembled ribonucleoprotein.

[1104] The individual components or pre-assembled ribonucleoprotein can be introduced into the plant cell via electroporation, by bombardment with Cpf1-associated gene product coated particles, by chemical transfection or by some other means of transport across a cell membrane. For instance, transfection of a plant protoplast with a pre-assembled CRISPR ribonucleoprotein has been demonstrated to ensure targeted modification of the plant genome (as described by Woo et al. Nature Biotechnology, 2015; DOI: 10.1038/nbt.3389).

[1105] In particular embodiments, the Cpf1 CRISPR system components are introduced into the plant cells using nanoparticles. The components, either as protein or nucleic acid or in a combination thereof, can be uploaded onto or packaged in nanoparticles and applied to the plants (such as for instance described in WO 2008042156 and US 20130185823). In particular, embodiments of the invention comprise nanoparticles uploaded with or packed with DNA molecule(s) encoding the Cpf1 protein, DNA molecules encoding the guide RNA and/or isolated guide RNA as described in WO2015089419.

[1106] Further means of introducing one or more components of the Cpf1 CRISPR system to the plant cell is by using cell penetrating peptides (CPP). Accordingly, in particular, embodiments the invention comprises compositions comprising a cell penetrating peptide linked to the Cpf1 protein. In particular embodiments of the present invention, the Cpf1 protein and/or guide RNA is coupled to one or more CPPs to effectively transport them inside plant protoplasts; see also Ramakrishna (20140 Genome Res. 2014 June; 24(6):1020-7 for Cas9 in human cells). In other embodiments, the Cpf1 gene and/or guide RNA are encoded by one or more circular or non-circular DNA molecule(s) which are coupled to one or more CPPs for plant protoplast delivery. The plant protoplasts are then regenerated to plant cells and further to plants. CPPs are generally described as short peptides of fewer than 35 amino acids either derived from proteins or from chimeric sequences which are capable of transporting biomolecules across cell membrane in a receptor independent manner. CPP can be cationic peptides, peptides having hydrophobic sequences, amphipatic peptides, peptides having proline-rich and anti-microbial sequence, and chimeric or bipartite peptides (Pooga and Langel 2005). CPPs are able to penetrate biological membranes and as such trigger the movement of various biomolecules across cell membranes into the cytoplasm and to improve their intracellular routing, and hence facilitate interaction of the biolomolecule with the target. Examples of CPP include amongst others: Tat, a nuclear transcriptional activator protein required for viral replication by HIV type1, penetratin, Kaposi fibroblast growth factor (FGF) signal peptide sequence, integrin β3 signal peptide sequence; polyarginine peptide Args sequence, Guanine rich-molecular transporters, sweet arrow peptide, etc. . . . .

### Use of the Cpf1 CRISPR System to Make Genetically Modified Non-Transgenic Plants

[1107] In particular embodiments, the methods described herein are used to modify endogenous genes or to modify their expression without the permanent introduction into the genome of the plant of any foreign gene, including those encoding CRISPR components, so as to avoid the presence of foreign DNA in the genome of the plant. This can be of interest as the regulatory requirements for non-transgenic plants are less rigorous.

[1108] In particular embodiments, this is ensured by transient expression of the Cpf1 CRISPR components. In particular embodiments one or more of the CRISPR components are expressed on one or more viral vectors which produce sufficient Cpf1 protein and guide RNA to consistently steadily ensure modification of a gene of interest according to a method described herein.

[1109] In particular embodiments, transient expression of Cpf1 CRISPR constructs is ensured in plant protoplasts and thus not integrated into the genome. The limited window of expression can be sufficient to allow the Cpf1 CRISPR system to ensure modification of a target gene as described herein.

[1110] In particular embodiments, the different components of the Cpf1 CRISPR system are introduced in the plant cell, protoplast or plant tissue either separately or in mixture, with the aid of particulate delivering molecules such as nanoparticles or CPP molecules as described herein above.

[1111] The expression of the Cpf1 CRISPR components can induce targeted modification of the genome, either by direct activity of the Cpf1 nuclease and optionally introduction of template DNA or by modification of genes targeted using the Cpf1 CRISPR system as described herein. The different strategies described herein above allow Cpf1-mediated targeted genome editing without requiring the introduction of the Cpf1 CRISPR components into the plant genome. Components which are transiently introduced into the plant cell are typically removed upon crossing.

### Detecting Modifications in the Plant Genome-Selectable Markers

[1112] In particular embodiments, where the method involves modification of an endogeneous target gene of the plant genome, any suitable method can be used to determine, after the plant, plant part or plant cell is infected or transfected with the Cpf1 CRISPR system, whether gene targeting or targeted mutagenesis has occurred at the target site. Where the method involves introduction of a transgene, a transformed plant cell, callus, tissue or plant may be identified and isolated by selecting or screening the engineered plant material for the presence of the transgene or for traits encoded by the transgene. Physical and biochemical methods may be used to identify plant or plant cell transformants containing inserted gene constructs or an endogenous DNA modification. These methods include but are not limited to: 1) Southern analysis or PCR amplification for detecting and determining the structure of the recombinant DNA insert or modified endogenous genes; 2) Northern blot, S1 RNase protection, primer-extension or reverse transcriptase-PCR amplification for detecting and examining RNA transcripts of the gene constructs; 3) enzymatic assays for detecting enzyme or ribozyme activity, where such gene products are encoded by the gene construct or expression is affected by the genetic modification; 4) protein gel electrophoresis, Western blot techniques, immunoprecipitation, or enzyme-linked immunoassays, where the gene construct or endogenous gene products are proteins. Additional techniques, such as in situ hybridization, enzyme staining, and immunostaining, also may be used to detect the presence or expression of the recombinant construct or detect a modification of endogenous gene in specific plant organs and tissues. The methods for doing all these assays are well known to those skilled in the art.

[1113] Additionally (or alternatively), the expression system encoding the Cpf1 CRISPR components is typically designed to comprise one or more selectable or detectable markers that provide a means to isolate or efficiently select cells that contain and/or have been modified by the Cpf1 CRISPR system at an early stage and on a large scale.

In the case of Agrobacterium-mediated transformation, the marker cassette may be adjacent to or between flanking T-DNA borders and contained within a binary vector. In another embodiment, the marker cassette may be outside of the T-DNA. A selectable marker cassette may also be within or adjacent to the same T-DNA borders as the expression cassette or may be somewhere else within a second T-DNA on the binary vector (e.g., a 2 T-DNA system).

[1114] For particle bombardment or with protoplast transformation, the expression system can comprise one or more isolated linear fragments or may be part of a larger construct that might contain bacterial replication elements, bacterial selectable markers or other detectable elements. The expression cassette(s) comprising the polynucleotides encoding the guide and/or Cpf1 may be physically linked to a marker cassette or may be mixed with a second nucleic acid molecule encoding a marker cassette. The marker cassette is comprised of necessary elements to express a detectable or selectable marker that allows for efficient selection of transformed cells.

[1115] The selection procedure for the cells based on the selectable marker will depend on the nature of the marker gene. In particular embodiments, use is made of a selectable marker, i.e. a marker which allows a direct selection of the cells based on the expression of the marker. A selectable marker can confer positive or negative selection and is conditional or non-conditional on the presence of external substrates (Miki et al. 2004, 107(3): 193-232). Most commonly, antibiotic or herbicide resistance genes are used as a marker, whereby selection is be performed by growing the engineered plant material on media containing an inhibitory amount of the antibiotic or herbicide to which the marker gene confers resistance. Examples of such genes are genes that confer resistance to antibiotics, such as hygromycin (hpt) and kanamycin (nptII), and genes that confer resistance to herbicides, such as phosphinothricin (bar) and chlorosulfuron (als),

[1116] Transformed plants and plant cells may also be identified by screening for the activities of a visible marker, typically an enzyme capable of processing a colored substrate (e.g., the β-glucuronidase, luciferase, B or C1 genes). Such selection and screening methodologies are well known to those skilled in the art.

### Plant Cultures and Regeneration

[1117] In particular embodiments, plant cells which have a modified genome and that are produced or obtained by any of the methods described herein, can be cultured to regenerate a whole plant which possesses the transformed or modified genotype and thus the desired phenotype. Conventional regeneration techniques are well known to those skilled in the art. Particular examples of such regeneration techniques rely on manipulation of certain phytohormones in a tissue culture growth medium, and typically relying on a biocide and/or herbicide marker which has been introduced together with the desired nucleotide sequences. In further particular embodiments, plant regeneration is Obtained from cultured protoplasts, plant callus, explants, organs, pollens, embryos or parts thereof (see e.g. Evans et al. (1983), Handbook of Plant Cell Culture, Klee et al (1987) Ann. Rev, of Plant Phys.).

[1118] In particular embodiments, transformed or improved plants as described herein can be self-pollinated to provide seed for homozygous improved plants of the invention (homozygous for the DNA modification) or crossed with non-transgenic plants or different improved plants to provide seed for heterozygous plants. Where a recombinant DNA was introduced into the plant cell, the resulting plant of such a crossing is a plant which is heterozygous for the recombinant DNA molecule. Both such homozygous and heterozygous plants obtained by crossing from the improved plants and comprising the genetic modification (which can be a recombinant DNA) are referred to herein as “progeny”. Progeny plants are plants descended from the original transgenic plant and containing the genome modification or recombinant DNA molecule introduced by the methods provided herein. Alternatively, genetically modified plants can be Obtained by one of the methods described supra using the Cpf1 enzyme whereby no foreign DNA is incorporated into the genome. Progeny of such plants, obtained by further breeding may also contain the genetic modification. Breedings are performed by any breeding methods that are commonly used for different crops (e.g., Allard, Principles of Plant Breeding, John Wiley & Sons, NY, U. of CA, Davis, Calif., 50-98 (1960),

Generation of Plants with Enhanced Agronomic Traits

[1119] The Cpf1 based CRISPR systems provided herein can be used to introduce targeted double-strand or single-strand breaks and/or to introduce gene activator and or repressor systems and without being limitative, can be used for gene targeting, gene replacement, targeted mutagenesis, targeted deletions or insertions, targeted inversions and/or targeted translocations. By co-expression of multiple targeting RNAs directed to achieve multiple modifications in a single cell, multiplexed genome modification can be ensured. This technology can be used to high-precision engineering of plants with improved characteristics, including enhanced nutritional quality, increased resistance to diseases and resistance to biotic and abiotic stress, and increased production of commercially valuable plant products or heterologous compounds.

[1120] In particular embodiments, the Cpf1 CRISPR system as described herein is used to introduce targeted double-strand breaks (DSB) in an endogenous DNA sequence. The DSB activates cellular DNA repair pathways, which can be harnessed to achieve desired DNA sequence modifications near the break site. This is of interest where the inactivation of endogenous genes can confer or contribute to a desired trait. In particular embodiments, homologous recombination with a template sequence is promoted at the site of the DSB, in order to introduce a gene of interest.

[1121] In particular embodiments, the Cpf1 CRISPR system may be used as a generic nucleic acid binding protein with fusion to or being operably linked to a functional domain for activation and/or repression of endogenous plant genes. Exemplary functional domains may include but are not limited to translational initiator, translational activator, translational repressor, nucleases, in particular ribonucleases, a spliceosome, beads, a light inducible/controllable domain or a chemically inducible/controllable domain. Typically in these embodiments, the Cpf1 protein comprises at least one mutation, such that it has no more than 5% of the activity of the Cpf1 protein not having the at least one mutation; the guide RNA comprises a guide sequence capable of hybridizing to a target sequence.

[1122] The methods described herein generally result in the generation of “improved plants” in that they have one or more desirable traits compared to the wildtype plant. In particular embodiments, the plants, plant cells or plant parts obtained are transgenic plants, comprising an exogenous DNA sequence incorporated into the genome of all or part of the cells of the plant. In particular embodiments, non-transgenic genetically modified plants, plant parts or cells are obtained, in that no exogenous DNA sequence is incorporated into the genome of any of the plant cells of the plant. In such embodiments, the improved plants are non-transgenic. Where only the modification of an endogenous gene is ensured and no foreign genes are introduced or maintained in the plant genome; the resulting genetically modified crops contain no foreign genes and can thus basically be considered non-transgenic. The different applications of the Cpf1 CRISPR system for plant genome editing are described more in detail below:

### a) Introduction of One or More Foreign Genes to Confer an Agricultural Trait of Interest

[1123] The invention provides methods of genome editing or modifying sequences associated with or at a target locus of interest wherein the method comprises introducing a Cpf1 effector protein complex into a plant cell, whereby the Cpf1 effector protein complex effectively functions to integrate a DNA insert, e.g. encoding a foreign gene of interest, into the genome of the plant cell. In preferred embodiments the integration of the DNA insert is facilitated by HR with an exogenously introduced DNA template or repair template. Typically, the exogenously introduced DNA template or repair template is delivered together with the Cpf1 effector protein complex or one component or a polynucleotide vector for expression of a component of the complex.

The Cpf1 CRISPR systems provided herein allow for targeted gene delivery. It has become increasingly clear that the efficiency of expressing a gene of interest is to a great extent determined by the location of integration into the genome. The present methods allow for targeted integration of the foreign gene into a desired location in the genome. The location can be selected based on information of previously generated events or can be selected by methods disclosed elsewhere herein.

[1124] In particular embodiments, the methods provided herein include (a) introducing into the cell a Cpf1 CRISPR complex comprising a guide RNA, comprising a direct repeat and a guide sequence, wherein the guide sequence hybridizes to a target sequence that is endogenous to the plant cell; (b) introducing into the plant cell a Cpf1 effector molecule which complexes with the guide RNA when the guide sequence hybridizes to the target sequence and induces a double strand break at or near the sequence to which the guide sequence is targeted; and (c) introducing into the cell a nucleotide sequence encoding an HDR repair template which encodes the gene of interest and which is introduced into the location of the DS break as a result of HDR. In particular embodiments, the step of introducing can include delivering to the plant cell one or more polynucleotides encoding Cpf1 effector protein, the guide RNA and the repair template. In particular embodiments, the polynucleotides are delivered into the cell by a DNA virus (e.g., a geminivirus) or an RNA virus (e.g., a tobravirus). In particular embodiments, the introducing steps include delivering to the plant cell a T-DNA containing one or more polynucleotide sequences encoding the Cpf1 effector protein, the guide RNA and the repair template, where the delivering is via Agrobacterium. The nucleic acid sequence encoding the Cpf1 effector protein can be operably linked to a promoter, such as a constitutive promoter (e.g., a cauliflower mosaic virus 35S promoter), or a cell specific or inducible promoter. In particular embodiments, the polynucleotide is introduced by microprojectile bombardment. In particular embodiments, the method further includes screening the plant cell after the introducing steps to determine whether the repair template i.e. the gene of interest has been introduced. In particular embodiments, the methods include the step of regenerating a plant from the plant cell. In further embodiments, the methods include cross breeding the plant to obtain a genetically desired plant lineage. Examples of foreign genes encoding a trait of interest are listed below.

### b) Editing of Endogenous Genes to Confer an Agricultural Trait of Interest

[1125] The invention provides methods of genome editing or modifying sequences associated with or at a target locus of interest wherein the method comprises introducing a Cpf1 effector protein complex into a plant cell, whereby the Cpf1 complex modifies the expression of an endogenous gene of the plant. This can be achieved in different ways, In particular embodiments, the elimination of expression of an endogenous gene is desirable and the Cpf1 CRISPR complex is used to target and cleave an endogenous gene so as to modify gene expression. In these embodiments, the methods provided herein include (a) introducing into the plant cell a Cpf1 CRISPR complex comprising a guide RNA, comprising a direct repeat and a guide sequence, wherein the guide sequence hybridizes to a target sequence within a gene of interest in the genome of the plant cell; and (b) introducing into the cell a Cpf1 effector protein, which upon binding to the guide RNA comprises a guide sequence that is hybridized to the target sequence, ensures a double strand break at or near the sequence to which the guide sequence is targeted; In particular embodiments, the step of introducing can include delivering to the plant cell one or more polynucleotides encoding Cpf1 effector protein and the guide RNA.

[1126] In particular embodiments, the polynucleotides are delivered into the cell by a DNA virus (e.g., a geminivirus) or an RNA virus (e.g., a tobravirus). In particular embodiments, the introducing steps include delivering to the plant cell a T-DNA containing one or more polynucleotide sequences encoding the Cpf1 effector protein and the guide RNA, where the delivering is via Agrobacterium. The polynucleotide sequence encoding the components of the Cpf1 CRISPR system can be operably linked to a promoter, such as a constitutive promoter (e.g., a cauliflower mosaic virus 35S promoter), or a cell specific or inducible promoter. In particular embodiments, the polynucleotide is introduced by microprojectile bombardment. In particular embodiments, the method further includes screening the plant cell after the introducing steps to determine whether the expression of the gene of interest has been modified. In particular embodiments, the methods include the step of regenerating a plant from the plant cell. In further embodiments, the methods include cross breeding the plant to obtain a genetically desired plant lineage.

[1127] In particular embodiments of the methods described above, disease resistant crops are obtained by targeted mutation of disease susceptibility genes or genes encoding negative regulators (e.g. Mlo gene) of plant defense genes. In a particular embodiment, herbicide-tolerant crops are generated by targeted substitution of specific nucleotides in plant genes such as those encoding acetolactate synthase (ALS) and protoporphyrinogen oxidase (PPO). In particular embodiments drought and salt tolerant crops by targeted mutation of genes encoding negative regulators of abiotic stress tolerance, low amylose grains by targeted mutation of Waxy gene, rice or other grains with reduced rancidity by targeted mutation of major lipase genes in aleurone layer, etc. In particular embodiments. A more extensive list of endogenous genes encoding a traits of interest are listed below.

### c) Modulating of Endogenous Genes by the Cpf1 CRISPR System to Confer an Agricultural Trait of Interest

[1128] Also provided herein are methods for modulating (i.e. activating or repressing) endogenous gene expression using the Cpf1 protein provided herein. Such methods make use of distinct RNA sequence(s) which are targeted to the plant genome by the Cpf1 complex. More particularly the distinct RNA sequence(s) bind to two or more adaptor proteins (e.g. aptamers) whereby each adaptor protein is associated with one or more functional domains and wherein at least one of the one or more functional domains associated with the adaptor protein have one or more activities comprising methylase activity, demethylase activity, transcription activation activity, transcription repression activity, transcription release factor activity, histone modification activity, DNA integration activity RNA cleavage activity, DNA cleavage activity or nucleic acid binding activity; The functional domains are used to modulate expression of an endogenous plant gene so as to obtain the desired trait. Typically, in these embodiments, the Cpf1 effector protein has one or more mutations such that it has no more than 5% of the nuclease activity of the Cpf1 effector protein not having the at least one mutation.

[1129] In particular embodiments, the methods provided herein include the steps of (a) introducing into the cell a Cpf1 CRISPR complex comprising a guide RNA, comprising a direct repeat and a guide sequence, wherein the guide sequence hybridizes to a target sequence that is endogenous to the plant cell; (b) introducing into the plant cell a Cpf1 effector molecule which complexes with the guide RNA when the guide sequence hybridizes to the target sequence; and wherein either the guide RNA is modified to comprise a distinct RNA sequence (aptamer) binding to a functional domain and/or the Cpf1 effector protein is modified in that it is linked to a functional domain. In particular embodiments, the step of introducing can include delivering to the plant cell one or more polynucleotides encoding the (modified) Cpf1 effector protein and the (modified) guide RNA. The details the components of the Cpf1 CRISPR system for use in these methods are described elsewhere herein.

[1130] In particular embodiments, the polynucleotides are delivered into the cell by a DNA virus (e.g., a geminivirus) or an RNA virus (e.g., a tobravirus). In particular embodiments, the introducing steps include delivering to the plant cell a T-DNA containing one or more polynucleotide sequences encoding the Cpf1 effector protein and the guide RNA, where the delivering is via Agrobacterium. The nucleic acid sequence encoding the one or more components of the Cpf1 CRISPR system can be operably linked to a promoter, such as a constitutive promoter (e.g., a cauliflower mosaic virus 35S promoter), or a cell specific or inducible promoter. In particular embodiments, the polynucleotide is introduced by microprojectile bombardment. In particular embodiments, the method further includes screening the plant cell after the introducing steps to determine whether the expression of the gene of interest has been modified. In particular embodiments, the methods include the step of regenerating a plant from the plant cell. In further embodiments, the methods include cross breeding the plant to obtain a genetically desired plant lineage. A more extensive list of endogenous genes encoding a traits of interest are listed below.

### Use of Cpf1 to Modify Polyploid Plants

[1131] Many plants are polyploid, which means they carry duplicate copies of their genomes—sometimes as many as six, as in wheat. The methods according to the present invention, which make use of the Cpf1 CRISPR effector protein can be “multiplexed” to affect all copies of a gene, or to target dozens of genes at once. For instance, in particular embodiments, the methods of the present invention are used to simultaneously ensure a loss of function mutation in different genes responsible for suppressing defences against a disease. In particular embodiments, the methods of the present invention are used to simultaneously suppress the expression of the TaMLO-Al, TaMLO-Bl and TaMLO-Dl nucleic acid sequence in a wheat plant cell and regenerating a wheat plant therefrom, in order to ensure that the wheat plant is resistant to powdery mildew (see also WO2015109752).

### Exemplary Genes Conferring Agronomic Traits

[1132] As described herein above, in particular embodiments, the invention encompasses the use of the Cpf1 CRISPR system as described herein for the insertion of a DNA of interest, including one or more plant expressible gene(s). In further particular embodiments, the invention encompasses methods and tools using the Cpf1 system as described herein for partial or complete deletion of one or more plant expressed gene(s). In other further particular embodiments, the invention encompasses methods and tools using the Cpf1 system as described herein to ensure modification of one or more plant-expressed genes by mutation, substitution, insertion of one of more nucleotides. In other particular embodiments, the invention encompasses the use of Cpf1 CRISPR system as described herein to ensure modification of expression of one or more plant-expressed genes by specific modification of one or more of the regulatory elements directing expression of said genes.

[1133] In particular embodiments, the invention encompasses methods which involve the introduction of exogenous genes and/or the targeting of endogenous genes and their regulatory elements, such as listed below:

[1134] 1. Genes that confer resistance to pests or diseases:
[1135] Plant disease resistance genes. A plant can be transformed with cloned resistance genes to engineer plants that are resistant to specific pathogen strains. See, e.g., Jones et al., Science 266:789 (1994) (cloning of the tomato Cf-9 gene for resistance to Cladosporium fulvum); Martin et al., Science 262:1432 (1993) (tomato Pto gene for resistance to Pseudomonas syringae pv. tomato encodes a protein kinase); Mindrinos et al., Cell 78:1089 (1994) (Arabidops may be RSP2 gene for resistance to Pseudomonas syringae).
[1136] Genes conferring resistance to a pest, such as soybean cyst nematode. See e.g., PCT Application WO 96/30517; PCT Application WO 93/19181.
[1137] Bacillus thuringiensis proteins see, e.g., Geiser et al., Gene 48:109 (1986).
[1138] Lectins, see, for example, Van Damme et al., Plant Molec. Biol. 24:25 (1994.
[1139] Vitamin-binding protein, such as avidin, see PCT application US93/06487, teaching the use of avidin and avidin homologues as larvicides against insect pests.
[1140] Enzyme inhibitors such as protease or proteinase inhibitors or amylase inhibitors. See, e.g., Abe et al., J. Biol. Chem. 262:16793 (1987), Huub et al., Plant Molec. Biol. 21:985 (1993)); Sumitani et al., Biosci. Biotech. Biochem. 57:1243 (1993) and U.S. Pat. No. 5,494,813.
[1141] Insect-specific hormones or pheromones such as ecdysteroid or juvenile hormone, a variant thereof, a mimetic based thereon, or an antagonist or agonist thereof. See, for example Hammock et al., Nature 344:458 (1990).
[1142] Insect-specific peptides or neuropeptides which, upon expression, disrupts the physiology of the affected pest. For example Regan, J. Biol. Chem. 269:9 (1994) and Pratt et al., Biochem. Biophys. Res. Comm. 163:1243 (1989). See also U.S. Pat. No. 5,266,317.
[1143] Insect-specific venom produced in nature by a snake, a wasp, or any other organism. For example, see Pang et al., Gene 116: 165 (1992).
[1144] Enzymes responsible for a hyperaccumulation of a monoterpene, a sesquiterpene, a steroid, hydroxamic acid, a phenylpropanoid derivative or another nonprotein molecule with insecticidal activity.
[1145] Enzymes involved in the modification, including the post-translational modification, of a biologically active molecule; for example, a glycolytic enzyme; a proteolytic enzyme, a lipolytic enzyme, a nuclease, a cyclase, a transaminase, an esterase, a hydrolase, a phosphatase, a kinase, a phosphorylase, a polymerase, an elastase, a chitinase and a glucanase, whether natural or synthetic. See PCT application WO93/02197, Kramer et al., Insect Biochem. Molec. Biol. 23:691 (1993) and Kawalleck et al., Plant Molec. Biol. 21:673 (1993).
[1146] Molecules that stimulates signal transduction. For example, see Botella et al., Plant Molec. Biol. 24:757 (1994), and Griess et al., Plant Physiol. 104:1467 (1994).
[1147] Viral-invasive proteins or a complex toxin derived therefrom. See Beachy et al., Ann. rev. Phytopathol. 28:451 (1990).
[1148] Developmental-arrestive proteins produced in nature by a pathogen or a parasite. See Lamb et al., Bio/Technology 10:1436 (1992) and Toubart et at, Plant J. 2:367 (1992).
[1149] A developmental-arrestive protein produced in nature by a plant. For example, Logemann et al., Bio/Technology 10:305 (1992).
[1150] In plants, pathogens are often host-specific. For example, some Fusarium species will causes tomato wilt but attacks only tomato, and other Fusarium species attack only wheat. Plants have existing and induced defenses to resist most pathogens. Mutations and recombination events across plant generations lead to genetic variability that gives rise to susceptibility, especially as pathogens reproduce with more frequency than plants. In plants there can be non-host resistance, e.g., the host and pathogen are incompatible or there can be partial resistance against all races of a pathogen, typically controlled by many genes and/or also complete resistance to some races of a pathogen but not to other races. Such resistance is typically controlled by a few genes. Using methods and components of the CRISP-cpf1 system, a new tool now exists to induce specific mutations in anticipation hereon. Accordingly, one can analyze the genome of sources of resistance genes, and in plants having desired characteristics or traits, use the method and components of the Cpf1 CRISPR system to induce the rise of resistance genes. The present systems can do so with more precision than previous mutagenic agents and hence accelerate and improve plant breeding programs.

[1151] 2. Genes involved in plant diseases, such as those listed in WO 2013046247:
[1152] Rice diseases: Magnaporthe grisea, Cochliobolus miyabeanus, Rhizoctonia solani, Gibberella fujikuroi; Wheat diseases: Erysiphe graminis, Fusarium graminearum, F. avenaceum, F. culmorum, Microdochium nivale, Puccinia striiformis, P. graminis, P. recondita, Micronectriella nivale, Typhula sp., Ustilago tritici, Tilletia caries, Pseudocercosporella herpotrichoides, Mycosphaerella graminicola, Stagonospora nodorum, Pyrenophora tritici-repentis; Barley diseases: Erysiphe graminis, Fusarium graminearum, F. avenaceum, F. culmorum, Microdochium nivale, Puccinia striiformis, P. graminis, P. hordei, Ustilago nuda, Rhynchosporium secalis, Pyrenophora teres, Cochliobolus sativus, Pyrenophora graminea, Rhizoctonia solani; Maize diseases: Ustilago maydis, Cochliobolus heterostrophus, Gloeocercospora sorghi, Puccinia polysora, Cercospora zeae-maydis, Rhizoctonia solani;
[1153] Citrus diseases: Diaporthe citri, Elsinoe fawcetti, Penicillium digitatum, P. italicum, Phytophthora parasitica, Phytophthora citrophthora; Apple diseases: Monilinia mali, Valsa ceratosperma, Podosphaera leucotricha, Alternaria alternata apple pathotype, Venturia inaequalis, Colletotrichum acutatum, Phytophtora cactorum;
[1154] Pear diseases: Venturia nashicola, V. pirina, Alternaria alternata Japanese pear pathotype, Gymnosporangium haraeanum, Phytophtora cactorum;
[1155] Peach diseases: Monilinia fructicola, Cladosporium carpophilum, Phomopsis sp.;
[1156] Grape diseases: Elsinoe ampelina, Glomerella cingulata, Uninula necator, Phakopsora ampelopsidis, Guignardia bidwellii, Plasmopara viticola;
[1157] Persimmon diseases: Gloesporium kaki; Cercospora kaki; Mycosphaerela nawae;
[1158] Gourd diseases: Colletotrichum lagenarium, Sphaerotheca fuliginea, Mycosphaerella melonis, Fusarium oxysporum, Pseudoperonospora cubensis, Phytophthora sp., Pythium sp.;
[1159] Tomato diseases: Alternaria solani, Cladosporium fulvum, Phytophthora infestans;
[1160] Eggplant diseases: Phomopsis vexans, Erysiphe cichoracearum; Brassicaceous vegetable diseases: Alternaria japonica, Cercosporella brassicae, Plasmodiophora brassicae, Peronospora parasitica;
[1161] Welsh onion diseases: Puccinia allii, Peronospora destructor;
[1162] Soybean diseases: Cercospora kikuchii, Elsinoe glycines, Diaporthe phaseolorum var. sojae, Septoria glycines, Cercospora sojina, Phakopsora pachyrhizi, Phytophthora sojae, Rhizoctonia solani, Corynespora casiicola, Sclerotinia sclerotiorum;
[1163] Kidney bean diseases: Colletrichum lindemthianum;
[1164] Peanut diseases: Cercospora personata, Cercospora arachidicola, Sclerotium rolfsii;
[1165] Pea diseases pea: Erysiphe pisi;
[1166] Potato diseases: Alternaria solani, Phytophthora infestans, Phytophthora erythroseptica, Spongospora subterranean, f. sp. Subterranean;
[1167] Strawberry diseases: Sphaerotheca humuli, Glomerella cingulata;
[1168] Tea diseases: Exobasidiuin reticulatum, Elsinoe leucospila, Pestalotiopsis sp., Colletotrichum theae-sinensis;
[1169] Tobacco diseases: Alternaria longipes, Erysiphe cichoracearum, Colletotrichum tabacum, Peronospora tabacina, Phytophthora nicotianae;
[1170] Rapeseed diseases: Sclerotinia sclerotiorum, Rhizoctonia solani;
[1171] Cotton diseases: Rhizoctonia solani;
[1172] Beet diseases: Cercospora beticola, Thanatephorus cucumeris, Thanatephorus cucumeris, Aphanomyces cochlioides;
[1173] Rose diseases: Diplocarpon rosae, Sphaerotheca pannosa, Peronospora sparsa;
[1174] Diseases of chrysanthemum and asteraceae: Bremia lactuca, Septoria chrysanthemi-indici, Puccinia horiana;
[1175] Diseases of various plants: Pythium aphanidermatum, Pythium debarianum, Pythium graminicola, Pythium irregulare, Pythium ultimum, Botrytis cinerea, Sclerotinia sclerotiorum;
[1176] Radish diseases: Alternaria brassicicola;
[1177] Zoysia diseases: Sclerotinia homeocarpa, Rhizoctonia solani;
[1178] Banana diseases: Mycosphaerella fijiensis, Mycosphaerella musicola;
[1179] Sunflower diseases: Plasmopara halstedii;
[1180] Seed diseases or diseases in the initial stage of growth of various plants caused by Aspergillus spp., Penicillium spp., Fusarium spp., Gibberella spp., Tricoderma spp., Thielaviopsis spp., Rhizopus spp., Mucor spp., Corticium spp., Rhoma spp., Rhizoctonia spp., Diplodia spp., or the like;
[1181] Virus diseases of various plants mediated by Polymixa spp., Olpidium spp., or the like.

[1182] 3. Examples of genes that confer resistance to herbicides:
[1183] Resistance to herbicides that inhibit the growing point or meristem, such as an imidazolinone or a sulfonylurea, for example, by Lee et al., EMBO J. 7:1241 (1988), and Miki et al., Theor. Appl. Genet. 80:449 (1990), respectively.
[1184] Glyphosate tolerance (resistance conferred by, e.g., mutant 5-enolpyruvylshikimate-3-phosphate synthase (EPSPs) genes, aroA genes and glyphosate acetyl transferase (GAT) genes, respectively), or resistance to other phosphono compounds such as by glufosinate (phosphinothricin acetyl transferase (PAT) genes from Streptomyces species, including Streptomyces hygroscopicus and Streptomyces viridichromogenes), and to pyridinoxy or phenoxy proprionic acids and cyclohexones by ACCase inhibitor-encoding genes. See, for example, U.S. Pat. No. 4,940,835 and U.S. Pat. No. 6,248,876, U.S. Pat. No. 4,769,061, EP No. 0 333 033 and U.S. Pat. No. 4,975,374. See also EP No. 0242246, DeGreef et al., Bio/Technology 7:61 (1989), Marshall et al., Theor. Appl. Genet. 83:435 (1992), WO 2005012515 to Castle et. al. and WO 2005107437.
[1185] Resistance to herbicides that inhibit photosynthesis, such as a triazine (psbA and gs+ genes) or a benzonitrile (nitrilase gene), and glutathione S-transferase in Przibila et al., Plant Cell 3:169 (1991), U.S. Pat. No. 4,810,648, and Hayes et al., Biochem. J. 285: 173 (1992).
[1186] Genes encoding Enzymes detoxifying the herbicide or a mutant glutamine synthase enzyme that is resistant to inhibition, e.g. n U.S. patent application Ser. No. 11/760,602. Or a detoxifying enzyme is an enzyme encoding a phosphinothricin acetyltransferase (such as the bar or pat protein from Streptomyces species). Phosphinothricin acetyltransferases are for example described in U.S. Pat. Nos. 5,561,236; 5,648,477; 5,646,024; 5,273,894; 5,637,489; 5,276,268; 5,739,082; 5,908,810 and 7,112,665.
[1187] Hydroxyphenylpyruyatedioxygenases (HPPD) inhibitors, ie naturally occurring HPPD resistant enzymes, or genes encoding a mutated or chimeric HPPD enzyme as described in WO 96/38567, WO 99/24585. and WO 99/24586, WO 2009/144079, WO 2002/046387, or U.S. Pat. No. 6,768,044.

[1188] 4. Examples of genes involved in abiotic stress tolerance:
[1189] Transgene capable of reducing the expression and/or the activity of poly(ADP-ribose) polymerase (PARP) gene in the plant cells or plants as described in WO 00/04173 or, WO/2006/045633.
[1190] Transgenes capable of reducing the expression and/or the activity of the PARG encoding genes of the plants or plants cells, as described e.g. in WO 2004/090140.
[1191] Transgenes coding for a plant-functional enzyme of the nicotineamide adenine dinucleotide salvage synthesis pathway including nicotinamidase, nicotinate phosphoribosyltransferase, nicotinic acid mononucleotide adenyl transferase, nicotinamide adenine dinucleotide synthetase or nicotine amide phosphotybosyltransferase as described e.g. in EP 04077624.7, WO 2006/133827, PCT/EP07/002,433, EP 1999263, or WO 2007/107326.
[1192] Enzymes involved in carbohydrate biosynthesis include those described in e.g. EP 0571427, WO 95/04826, EP 0719338, WO 96/15248, WO 96/19581, WO 96/27674, WO 97/11188, WO 97/26362, WO 97/32985, WO 97/42328, WO 97/44472, WO 97/45545, WO 98/27212, WO 98/40503, WO99/58688, WO 99/58690, WO 99/58654, WO 00/08184, WO 00/08185, WO 00/08175, WO 00/28052, WO 00/77229, WO 01/12782, WO 01/12826, WO 02/101059, WO 03/071860, WO 2004/056999, WO 2005/030942, WO 2005/030941, WO 2005/095632, WO 2005/095617, WO 2005/095619, WO 2005/095618, WO 2005/123927, WO 2006/018319, WO 2006/103107, WO 2006/108702, WO 2007/009823, WO 00/22140, WO 2006/063862, WO 2006/072603, WO 02/034923, EP 06090134.5, EP 06090228.5, EP 06090227.7, EP 07090007.1, EP 07090009.7, WO 01/14569, WO 02/79410, WO 03/33540, WO 2004/078983, WO 01/19975, WO 95/26407, WO 96/34968, WO 98/20145, WO 99/12950, WO 99/66050, WO 99/53072, U.S. Pat. No. 6,734,341, WO 00/11192, WO 98/22604, WO 98/32326, WO 01/98509, WO 01/98509, WO 2005/002359, U.S. Pat. No. 5,824,790, U.S. Pat. No. 6,013,861, WO 94/04693, WO 94/09144, WO 94/11520, WO 95/35026 or WO 97/20936 or enzymes involved in the production of polyfructose, especially of the inulin and levan-type, as disclosed in EP 0663956, WO 96/01904, WO 96/21023, WO 98/39460, and WO 99/24593, the production of alpha-1,4-glucans as disclosed in WO 95/31553, US 2002031826, U.S. Pat. No. 6,284,479, U.S. Pat. No. 5,712,107, WO 97/47806, WO 97/47807, WO 97/47808 and WO 00/14249, the production of alpha-1,6 branched alpha-1,4-glucans, as disclosed in WO 00/73422, the production of alternan, as disclosed in e.g. WO 00/47727, WO 00/73422, EP 06077301.7, U.S. Pat. No. 5,908,975 and EP 0728213, the production of hyaluronan, as for example disclosed in WO 2006/032538, WO 2007/039314, WO 2007/039315, WO 2007/039316, JP 2006304779. and WO 2005/012529.
[1193] Genes that improve drought resistance. For example, WO 2013122472 discloses that the absence or reduced level of functional Ubiquitin Protein Ligase protein (UPL) protein, more specifically, UPL3, leads to a decreased need for water or improved resistance to drought of said plant. Other examples of transgenic plants with increased drought tolerance are disclosed in, for example, US 2009/0144850, US 2007/0266453, and WO 2002/083911. US2009/0144850 describes a plant displaying a drought tolerance phenotype due to altered expression of a DR02 nucleic acid. US 2007/0266453 describes a plant displaying a drought tolerance phenotype due to altered expression of a DR03 nucleic acid and WO 2002/083911 describes a plant having an increased tolerance to drought stress due to a reduced activity of an ABC transporter which is expressed in guard cells. Another example is the work by Kasuga and co-authors (1999), who describe that overexpression of cDNA encoding DREB1 A in transgenic plants activated the expression of many stress tolerance genes under normal growing conditions and resulted in improved tolerance to drought, salt loading, and freezing. However, the expression of DREB1A also resulted in severe growth retardation under normal growing conditions (Kasuga (1999) Nat Biotechnol 17(3) 287-291).

[1194] In further particular embodiments, crop plants can be improved by influencing specific plant traits. For example, by developing pesticide-resistant plants, improving disease resistance in plants, improving plant insect and nematode resistance, improving plant resistance against parasitic weeds, improving plant drought tolerance, improving plant nutritional value, improving plant stress tolerance, avoiding self-pollination, plant forage digestibility biomass, grain yield etc. A few specific non-limiting examples are provided hereinbelow.

[1195] In addition to targeted mutation of single genes, Cpf1CRISPR complexes can be designed to allow targeted mutation of multiple genes, deletion of chromosomal fragment, site-specific integration of transgene, site-directed mutagenesis in vivo, and precise gene replacement or allele swapping in plants. Therefore, the methods described herein have broad applications in gene discovery and validation, mutational and cisgenic breeding, and hybrid breeding. These applications facilitate the production of a new generation of genetically modified crops with various improved agronomic traits such as herbicide resistance, disease resistance, abiotic stress tolerance, high yield, and superior quality.

### Use of Cpf1 Gene to Create Male Sterile Plants

[1196] Hybrid plants typically have advantageous agronomic traits compared to inbred plants. However, for self-pollinating plants, the generation of hybrids can be challenging. In different plant types, genes have been identified which are important for plant fertility, more particularly male fertility. For instance, in maize, at least two genes have been identified which are important in fertility (Amitabh Mohanty international Conference on New Plant Breeding Molecular Technologies Technology Development And Regulation, Oct. 9-10, 2014, Jaipur, India; Svitashev et al. Plant Physiol. 2015 October; 169(2):931-45, Djukanovic et at Plant J. 2013 December; 76(5):888-99). The methods provided herein can be used to target genes required for male fertility so as to generate male sterile plants which can easily be crossed to generate hybrids. In particular embodiments, the Cpf1 CRISPR system provided herein is used for targeted mutagenesis of the cytochrome P450-like gene (MS26) or the meganuclease gene (MS45) thereby conferring male sterility to the maize plant. Maize plants which are as such genetically altered can be used in hybrid breeding programs.

### Increasing the Fertility Stage in Plants

[1197] In particular embodiments, the methods provided herein are used to prolong the fertility stage of a plant such as of a rice plant. For instance, a rice fertility stage gene such as Ehd3 can be targeted in order to generate a mutation in the gene and plantlets can be selected for a prolonged regeneration plant fertility stage (as described in CN 104004782)

### Use of Cpf1 to Generate Genetic Variation in a Crop of Interest

[1198] The availability of wild germplasm and genetic variations in crop plants is the key to crop improvement programs, but the available diversity in germplasms from crop plants is limited. The present invention envisages methods for generating a diversity of genetic variations in a germplasm of interest. In this application of the Cpf1 CRISPR system a library of guide RNAs targeting different locations in the plant genome is provided and is introduced into plant cells together with the Cpf1 effector protein. In this way a collection of genome-scale point mutations and gene knock-outs can be generated. In particular embodiments, the methods comprise generating a plant part or plant from the cells so obtained and screening the cells for a trait of interest. The target genes can include both coding and non-coding regions. In particular embodiments, the trait is stress tolerance and the method is a method for the generation of stress-tolerant crop varieties

### Use of Cpf1 to Affect Fruit-Ripening

[1199] Ripening is a normal phase in the maturation process of fruits and vegetables. Only a few days after it starts it renders a fruit or vegetable inedible. This process brings significant losses to both farmers and consumers. In particular embodiments, the methods of the present invention are used to reduce ethylene production. This is ensured by ensuring one or more of the following: a. Suppression of ACC synthase gene expression. ACC (1-aminocyclopropane-1-carboxylic acid) synthase is the enzyme responsible for the conversion of S-adenosylmethionine (SAM) to ACC; the second to the last step in ethylene biosynthesis. Enzyme expression is hindered when an antisense (“mirror-image”) or truncated copy of the synthase gene is inserted into the plant's genome; b. Insertion of the ACC deaminase gene. The gene coding for the enzyme is obtained from Pseudomonas chlororaphis, a common nonpathogenic soil bacterium. It converts ACC to a different compound thereby reducing the amount of ACC available for ethylene production; c. Insertion of the SAM hydrolase gene. This approach is similar to ACC deaminase wherein ethylene production is hindered when the amount of its precursor metabolite is reduced; in this case SAM is converted to homoserine. The gene coding for the enzyme is obtained from E. coli T3 bacteriophage and d. Suppression of ACC oxidase gene expression. ACC oxidase is the enzyme which catalyzes the oxidation of ACC to ethylene, the last step in the ethylene biosynthetic pathway. Using the methods described herein, down regulation of the ACC oxidase gene results in the suppression of ethylene production, thereby delaying fruit ripening. In particular embodiments, additionally or alternatively to the modifications described above, the methods described herein are used to modify ethylene receptors, so as to interfere with ethylene signals obtained by the fruit. In particular embodiments, expression of the ETR1 gene, encoding an ethylene binding protein is modified, more particularly suppressed. In particular embodiments, additionally or alternatively to the modifications described above, the methods described herein are used to modify expression of the gene encoding Polygalacturonase (PG), which is the enzyme responsible for the breakdown of pectin; the substance that maintains the integrity of plant cell walls. Pectin breakdown occurs at the start of the ripening process resulting in the softening of the fruit. Accordingly, in particular embodiments, the methods described herein are used to introduce a mutation in the PG gene or to suppress activation of the PG gene in order to reduce the amount of PG enzyme produced thereby delaying pectin degradation.

[1200] Thus in particular embodiments, the methods comprise the use of the Cpf1 CRISPR system to ensure one or more modifications of the genome of a plant cell such as described above, and regenerating a plant therefrom. In particular embodiments, the plant is a tomato plant.

### Increasing Storage Life of Plants

[1201] In particular embodiments, the methods of the present invention are used to modify genes involved in the production of compounds which affect storage life of the plant or plant part. More particularly, the modification is in a gene that prevents the accumulation of reducing sugars in potato tubers. Upon high-temperature processing, these reducing sugars react with free amino acids, resulting in brown, bitter-tasting products and elevated levels of acrylamide, which is a potential carcinogen. In particular embodiments, the methods provided herein are used to reduce or inhibit expression of the vacuolar invertase gene (Vine), which encodes a protein that breaks down sucrose to glucose and fructose (Clasen et al. DOI: 10.1111/pbi.12370).

### The Use of the Cpf1 CRISPR System to Ensure a Value Added Trait

[1202] In particular embodiments the Cpf1 CRISPR system is used to produce nutritionally improved agricultural crops. In particular embodiments, the methods provided herein are adapted to generate “functional foods”, i.e. a modified food or food ingredient that may provide a health benefit beyond the traditional nutrients it contains and or “nutraceutical”, i.e. substances that may be considered a food or part of a food and provides health benefits, including the prevention and treatment of disease. In particular embodiments, the nutraceutical is useful in the prevention and/or treatment of one or more of cancer, diabetes, cardiovascular disease, and hypertension.

[1203] Examples of nutritionally improved crops include (Newell-McGloughlin, Plant Physiology, July 2008, Vol. 147, pp. 939-953):
[1204] modified protein quality, content and/or amino acid composition, such as have been described for Bahiagrass (Luciani et al. 2005, Florida Genetics Conference Poster), Canola (Roesler et al., 1997, Plant Physiol 113 75-81), Maize (Cromwell et al, 1967, 1969 J Anim Sci 26 1325-1331, O'Quin et al. 2000 J Anim Sci 78 2144-2149, Yang et al. 2002, Transgenic Res 11 11-20, Young et al. 2004, Plant J 38 910-922), Potato (Yu J and Ao, 1997 Acta Bot Sin 39 329-334; Chakraborty et al. 2000, Proc Natl Acad Sci USA 97 3724-3729; Li et al. 2001) Chin Sci Bull 46 482-484, Rice (Katsube et al. 1999, Plant Physiol 120 1063-1074), Soybean (Dinkins et al. 2001, Rapp 2002, In Vitro Cell Dev Biol Plant 37 742-747), Sweet Potato (Egnin and Prakash 1997, In Vitro Cell Dev Biol 33 52A).
[1205] essential amino acid content, such as has been described for Canola (Falco et al. 1995, Bio/Technology 13 577-582), Lupin (White et al. 2001, J Sci Food Agric 81 147-154), Maize (Lai and Messing, 2002, Agbios 2008 GM crop database (Mar. 11, 2008)), Potato (Zeh et al. 2001, Plant Physiol 127 792-802), Sorghum (Zhao et al. 2003, Kluwer Academic Publishers, Dordrecht, The Netherlands, pp 413-416), Soybean (Falco et al. 1995 Bio/Technology 13 577-582; Galili et al. 2002 Crit Rev Plant Sci 21 167-204).
[1206] Oils and Fatty acids such as for Canola (Dehesh et al. (1996) Plant J 9 167-172 [PubMed]; Del Vecchio (1996) INFORM International News on Fats, Oils and Related Materials 7 230-243; Roesler et al. (1997) Plant Physiol 113 75-81 [PMC free article] [PubMed]; Froman and Ursin (2002, 2003) Abstracts of Papers of the American Chemical Society 223 U35; James et al. (2003) Am J Clin Nutr 77 1140-1145 [PubMed]; Agbios (2008, above); coton (Chapman et al. (2001). J Am Oil Chem Soc 78 941-947; Liu et al. (2002) J Am Coll Nutr 21 205S-211S [PubMed]; O'Neill (2007) Australian Life Scientist. http://www.biotechnews.com.au/index.php/id;866694817;fp;4;fpid;2 (Jun. 17, 2008), Linseed (Abbadi et al., 2004, Plant Cell 16: 2734-2748), Maize (Young et al., 2004, Plant J 38 910-922), oil palm (Jalani et al. 1997, J Am Oil Chem Soc 74 1451-1455; Parveez, 2003, AgBiotechNet 113 1-8), Rice (Anai et al., 2003, Plant Cell Rep 21 988-992), Soybean (Reddy and Thomas, 1996, Nat Biotechnol 14 639-642; Kinney and Kwolton, 1998, Blackie Academic and Professional, London, pp 193-213), Sunflower (Arcadia, Biosciences 2008)
[1207] Carbohydrates, such as Fructans described for Chicory (Smeekens (1997) Trends Plant Sci 2 286-287, Sprenger et al. (1997) FEBS Lett 400 355-358, Sévenier et al. (1998) Nat Biotechnol 16.843-846), Maize (Caimi et al. (1996) Plant Physiol 110 355-363), Potato (Hellwege et al., 1997 Plant J 12 1057-1065), Sugar Beet (Smeekens et al. 1997, above), Inulin, such as described for Potato (Hellewege et al. 2000, Proc Natl Acad Sci USA 97 8699-8704), Starch, such as described for Rice (Schwall et al. (2000) Nat Biotechnol 18 551-554, Chiang et al. (2005) Mol Breed 15 125-143),
[1208] Vitamins and carotenoids, such as described for Canola (Shintani and DellaPenna (1998) Science 282 2098-2100), Maize (Rocheford et al. (2002). J Am Coll Nutr 21 191S-198S, Cahoon et al. (2003) Nat Biotechnol 21 1082-1087, Chen et al. (2003) Proc Natl Acad Sci USA 100 3525-3530), Mustardseed (Shewmaker et al. (1999) Plant J 20 401-412, Potato (Ducreux et al., 2005, J Exp Bot 56 81-89), Rice (Ye et al. (2000) Science 287 303-305, Strawberry (Agius et al. (2003), Nat Biotechnol 21 177-181), Tomato (Rosati et al. (2000) Plant J 24 413-419, Fraser et al. (2001) J Sci Food Agric 81 822-827, Mehta et al. (2002) Nat Biotechnol 20 613-618, Diaz de la Garza et al. (2004) Proc Natl Acad Sci USA 101 13720-13725, Enfissi et al. (2005) Plant Biotechnol J 3 17-27, DellaPenna (2007) Proc Natl Acad Sci USA 104 3675-3676.
[1209] Functional secondary metabolites, such as described for Apple (stilbenes, Szankowski et al. (2003) Plant Cell Rep 22: 141-149), Alfalfa (resveratrol, Hipskind and Paiva (2000) Mol Plant Microbe Interact 13 551-562), Kiwi (resveratrol, Kobayashi et al. (2000) Plant Cell Rep 19 904-910), Maize and Soybean (flavonoids, Yu et al. (2000) Plant Physiol 124 781-794), Potato (anthocyanin and alkaloid glycoside, Lukaszewicz et al. (2004) J Agric Food Chem 52 1526-1533), Rice (flavonoids & resveratrol, Stark-Lorenzen et al. (1997) Plant Cell Rep 16 668-673, Shin et al. (2006) Plant Biotechnol J 4 303-315), Tomato (+resveratrol, chlorogenic acid, flavonoids, stilbene; Rosati et al. (2000) above, Muir et al. (2001) Nature 19 470-474, Niggeweg et al. (2004) Nat Biotechnol 22 746-754, Giovinazzo et al. (2005) Plant Biotechnol J 3 57-69), wheat (caffeic and ferulic acids, resveratrol; United Press International (2002)); and
[1210] Mineral availabilities such as described for Alfalfa (phytase, Austin-Phillips et al. (1999) http://www.molecularfarming.com/nonmedical.html), Lettuse (iron, Goto et al. (2000) Theor Appl Genet 100 658-664), Rice (iron, Lucca et al. (2002) J Am Coll Nutr 21 184S-190S), Maize, Soybean and wheat (phytase, Drakakaki et al. (2005) Plant Mol Biol 59 869-880, Denbow et al. (1998) Poult Sci 77 878-881, Brinch-Pedersen et al. (2000) Mol Breed 6 195-206).

[1211] In particular embodiments, the value-added trait is related to the envisaged health benefits of the compounds present in the plant. For instance, in particular embodiments, the value-added crop is obtained by applying the methods of the invention to ensure the modification of or induce/increase the synthesis of one or more of the following compounds:
[1212] Carotenoids, such as α-Carotene present in carrots which Neutralizes free radicals that may cause damage to cells or β-Carotene present in various fruits and vegetables which neutralizes free radicals
[1213] Lutein present in green vegetables which contributes to maintenance of healthy vision
[1214] Lycopene present in tomato and tomato products, which is believed to reduce the risk of prostate cancer
[1215] Zeaxanthin, present in citrus and maize, which contributes to maintenance of healthy vision
[1216] Dietary fiber such as insoluble fiber present in wheat bran which may reduce the risk of breast and/or colon cancer and β-Glucan present in oat, soluble fiber present in Psylium and whole cereal grains which may reduce the risk of cardiovascular disease (CVD)
[1217] Fatty acids, such as ω-3 fatty acids which may reduce the risk of CVD and improve mental and visual functions, Conjugated linoleic acid, which may improve body composition, may decrease risk of certain cancers and GLA which may reduce inflammation risk of cancer and CVD, may improve body composition
[1218] Flavonoids such as Hydroxycinnamates, present in wheat which have Antioxidant-like activities, may reduce risk of degenerative diseases, flavonols, catechins and tannins present in fruits and vegetables which neutralize free radicals and may reduce risk of cancer
[1219] Glucosinolates, indoles, isothiocyanates, such as Sulforaphane, present in Cruciferous vegetables (broccoli, kale), horseradish, which neutralize free radicals, may reduce risk of cancer
[1220] Phenolics, such as stilbenes present in grape which may reduce risk of degenerative diseases, heart disease, and cancer, may have longevity effect and caffeic acid and ferulic acid present in vegetables and citrus which have Antioxidant-like activities, may reduce risk of degenerative diseases, heart disease, and eye disease, and epicatechin present in cacao which has Antioxidant-like activities, may reduce risk of degenerative diseases and heart disease
[1221] Plant stanols/sterols present in maize, soy, wheat and wooden oils which May reduce risk of coronary heart disease by lowering blood cholesterol levels
[1222] Fructans, inulins, fructo-oligosaccharides present in Jerusalem artichoke, shallot, onion powder which may improve gastrointestinal health
[1223] Saponins present in soybean, which may lower LDL cholesterol
[1224] Soybean protein present in soybean which may reduce risk of heart disease
[1225] Phytoestrogens such as isoflavones present in soybean which may reduce menopause symptoms, such as hot flashes, may reduce osteoporosis and CVD and lignans present in flax, rye and vegetables, which May protect against heart disease and some cancers, may lower cholesterol, total cholesterol.
[1226] Sulfides and thiols such as diallyl sulphide present in onion, garlic, olive, leek and scallon and Allyl methyl trisulfide, dithiolthiones present in cruciferous vegetables which may lower LDL cholesterol, helps to maintain healthy immune system
[1227] Tannins, such as proanthocyanidins, present in cranberry, cocoa, which may improve urinary tract health, may reduce risk of CVD and high blood pressure
[1228] Etc.

[1229] In addition, the methods of the present invention also envisage modifying protein/starch functionality, shelf life, taste/aesthetics, fiber quality, and allergen, antinutrient, and toxin reduction traits.

[1230] Accordingly, the invention encompasses methods for producing plants with nutritional added value, said methods comprising introducing into a plant cell a gene encoding an enzyme involved in the production of a component of added nutritional value using the Cpf1 CRISPR system as described herein and regenerating a plant from said plant cell, said plant characterized in an increase expression of said component of added nutritional value. In particular embodiments, the Cpf1 CRISPR system is used to modify the endogenous synthesis of these compounds indirectly, e.g. by modifying one or more transcription factors that controls the metabolism of this compound. Methods for introducing a gene of interest into a plant cell and/or modifying an endogenous gene using the Cpf1 CRISPR system are described herein above.

[1231] Some specific examples of modifications in plants that have been modified to confer value-added traits are: plants with modified fatty acid metabolism, for example, by transforming a plant with an antisense gene of stearyl-ACP desaturase to increase stearic acid content of the plant. See Knultzon et al., Proc. Natl. Acad. Sci. U.S.A. 89:2624 (1992). Another example involves decreasing phytate content, for example by cloning and then reintroducing DNA associated with the single allele which may be responsible for maize mutants characterized by low levels of phytic acid. See Raboy et al, Maydica 35:383 (1990).

[1232] Similarly, expression of the maize (Zea mays) Tfs C1 and R, which regulate the production of flavonoids in maize aleurone layers under the control of a strong promoter, resulted in a high accumulation rate of anthocyanins in Arabidopsis (Arabidopsis thaliana), presumably by activating the entire pathway (Bruce et al., 2000, Plant Cell 12:65-80). DellaPenna (Welsch et al., 2007 Annu Rev Plant Biol 57: 711-738) found that Tf RAP2.2 and its interacting partner SINAT2 increased carotenogenesis in Arabidopsis leaves. Expressing the Tf Dof1 induced the up-regulation of genes encoding enzymes for carbon skeleton production, a marked increase of amino acid content, and a reduction of the Glc level in transgenic Arabidopsis (Yanagisawa, 2004 Plant Cell Physiol 45: 386-391), and the DOF Tf AtDof1.1 (OBP2) up-regulated all steps in the glucosinolate biosynthetic pathway in Arabidopsis (Skirycz et al., 2006 Plant J 47: 10-24).

### Reducing Allergen in Plants

[1233] In particular embodiments the methods provided herein are used to generate plants with a reduced level of allergens, making them safer for the consumer. In particular embodiments, the methods comprise modifying expression of one or more genes responsible for the production of plant allergens. For instance, in particular embodiments, the methods comprise down-regulating expression of a Lol p5 gene in a plant cell, such as a ryegrass plant cell and regenerating a plant therefrom so as to reduce allergenicity of the pollen of said plant (Bhalla et al. 1999, Proc. Natl. Acad. Sci. USA Vol. 96: 11676-11680).

[1234] Peanut allergies and allergies to legumes generally are a real and serious health concern. The Cpf1 effector protein system of the present invention can be used to identify and then edit or silence genes encoding allergenic proteins of such legumes. Without limitation as to such genes and proteins, Nicolaou et al. identifies allergenic proteins in peanuts, soybeans, lentils, peas, lupin, green beans, and mung beans. See, Nicolaou et al., Current Opinion in Allergy and Clinical Immunology 2011; 11(3):222).

### Screening Methods for Endogenous Genes of Interest

[1235] The methods provided herein further allow the identification of genes of value encoding enzymes involved in the production of a component of added nutritional value or generally genes affecting agronomic traits of interest, across species, phyla, and plant kingdom. By selectively targeting e.g. genes encoding enzymes of metabolic pathways in plants using the Cpf1 CRISPR system as described herein, the genes responsible for certain nutritional aspects of a plant can be identified. Similarly, by selectively targeting genes which may affect a desirable agronomic trait, the relevant genes can be identified. Accordingly, the present invention encompasses screening methods for genes encoding enzymes involved in the production of compounds with a particular nutritional value and/or agronomic traits.

### Further Applications of the Cpf1 CRISPR System in Plants and Yeasts

### Use of Cpf1 CRISPR System in Biofuel Production

[1236] The term “biofuel” as used herein is an alternative fuel made from plant and plant-derived resources. Renewable biofuels can be extracted from organic matter whose energy has been obtained through a process of carbon fixation or are made through the use or conversion of biomass. This biomass can be used directly for biofuels or can be converted to convenient energy containing substances by thermal conversion, chemical conversion, and biochemical conversion. This biomass conversion can result in fuel in solid, liquid, or gas form. There are two types of biofuels: bioethanol and biodiesel. Bioethanol is mainly produced by the sugar fermentation process of cellulose (starch), which is mostly derived from maize and sugar cane. Biodiesel on the other hand is mainly produced from oil crops such as rapeseed, palm, and soybean. Biofuels are used mainly for transportation.

### Enhancing Plant Properties for Biofuel Production

[1237] In particular embodiments, the methods using the Cpf1 CRISPR system as described herein are used to alter the properties of the cell wall in order to facilitate access by key hydrolysing agents for a more efficient release of sugars for fermentation. In particular embodiments, the biosynthesis of cellulose and/or lignin are modified. Cellulose is the major component of the cell wall. The biosynthesis of cellulose and lignin are co-regulated. By reducing the proportion of lignin in a plant the proportion of cellulose can be increased. In particular embodiments, the methods described herein are used to downregulate lignin biosynthesis in the plant so as to increase fermentable carbohydrates. More particularly, the methods described herein are used to downregulate at least a first lignin biosynthesis gene selected from the group consisting of 4-coumarate 3-hydroxylase (C3H), phenylalanine ammonia-lyase (PAL), cinnamate 4-hydroxylase (C4H), hydroxycinnamoyl transferase (HCT), caffeic acid O-methyltransferase (COMT), caffeoyl CoA 3-O-methyltransferase (CCoAOMT), ferulate 5-hydroxylase (F5H), cinnamyl alcohol dehydrogenase (CAD), cinnamoyl CoA-reductase (CCR), 4-coumarate-CoA ligase (4CL), monolignol-lignin-specific glycosyltransferase, and aldehyde dehydrogenase (ALDH) as disclosed in WO 2008064289 A2.

[1238] In particular embodiments, the methods described herein are used to produce plant mass that produces lower levels of acetic acid during fermentation (see also WO 2010096488). More particularly, the methods disclosed herein are used to generate mutations in homologs to Cas1L to reduce polysaccharide acetylation.

### Modifying Yeast for Biofuel Production

[1239] In particular embodiments, the Cpf1 enzyme provided herein is used for bioethanol production by recombinant micro-organisms. For instance, Cpf1 can be used to engineer micro-organisms, such as yeast, to generate biofuel or biopolymers from fermentable sugars and optionally to be able to degrade plant-derived lignocellulose derived from agricultural waste as a source of fermentable sugars. More particularly, the invention provides methods whereby the Cpf1 CRISPR complex is used to introduce foreign genes required for biofuel production into micro-organisms and/or to modify endogenous genes why may interfere with the biofuel synthesis. More particularly the methods involve introducing into a micro-organism such as a yeast one or more nucleotide sequence encoding enzymes involved in the conversion of pyruvate to ethanol or another product of interest. In particular embodiments the methods ensure the introduction of one or more enzymes which allows the micro-organism to degrade cellulose, such as a cellulase. In yet further embodiments, the Cpf1 CRISPR complex is used to modify endogenous metabolic pathways which compete with the biofuel production pathway.

[1240] Accordingly, in more particular embodiments, the methods described herein are used to modify a micro-organism as follows:
[1241] to introduce at least one heterologous nucleic acid or increase expression of at least one endogenous nucleic acid encoding a plant cell wall degrading enzyme, such that said micro-organism is capable of expressing said nucleic acid and of producing and secreting said plant cell wall degrading enzyme;
[1242] to introduce at least one heterologous nucleic acid or increase expression of at least one endogenous nucleic acid encoding an enzyme that converts pyruvate to acetaldehyde optionally combined with at least one heterologous nucleic acid encoding an enzyme that converts acetaldehyde to ethanol such that said host cell is capable of expressing said nucleic acid; and/or
[1243] to modify at least one nucleic acid encoding for an enzyme in a metabolic pathway in said host cell, wherein said pathway produces a metabolite other than acetaldehyde from pyruvate or ethanol from acetaldehyde, and wherein said modification results in a reduced production of said metabolite, or to introduce at least one nucleic acid encoding for an inhibitor of said enzyme.

### Modifying Algae and Plants for Production of Vegetable Oils or Biofuels

[1244] Transgenic algae or other plants such as rape may be particularly useful in the production of vegetable oils or biofuels such as alcohols (especially methanol and ethanol), for instance. These may be engineered to express or overexpress high levels of oil or alcohols for use in the oil or biofuel industries.

[1245] According to particular embodiments of the invention, the Cpf1 CRISPR system is used to generate lipid-rich diatoms which are useful in biofuel production.

[1246] In particular embodiments it is envisaged to specifically modify genes that are involved in the modification of the quantity of lipids and/or the quality of the lipids produced by the algal cell. Examples of genes encoding enzymes involved in the pathways of fatty acid synthesis can encode proteins having for instance acetyl-CoA carboxylase, fatty acid synthase, 3-ketoacyl_acyl-carrier protein synthase III, glycerol-3-phosphate deshydrogenase (G3PDH), Enoyl-acyl carrier protein reductase (Enoyl-ACP-reductase), glycerol-3-phosphate acyltransferase, lysophosphatidic acyl transferase or diacylglycerol acyltransferase, phospholipid: diacylglycerol acyltransferase, phoshatidate phosphatase, fatty acid thioesterase such as palmitoyl protein thioesterase, or malic enzyme activities. In further embodiments it is envisaged to generate diatoms that have increased lipid accumulation. This can be achieved by targeting genes that decrease lipid catabolisation. Of particular interest for use in the methods of the present invention are genes involved in the activation of both triacylglycerol and free fatty acids, as well as genes directly involved in (3-oxidation of fatty acids, such as acyl-CoA synthetase, 3-ketoacyl-CoA thiolase, acyl-CoA oxidase activity and phosphoglucomutase. The Cpf1 CRISPR system and methods described herein can be used to specifically activate such genes in diatoms as to increase their lipid content.

[1247] Organisms such as microalgae are widely used for synthetic biology. Stovicek et al. (Metab. Eng. Comm., 2015; 2:13 describes genome editing of industrial yeast, for example, Saccharomyces cerevisae, to efficiently produce robust strains for industrial production. Stovicek used a CRISPR-Cas9 system codon-optimized for yeast to simultaneously disrupt both alleles of an endogenous gene and knock in a heterologous gene. Cas9 and gRNA were expressed from genomic or episomal 2μ-based vector locations. The authors also showed that gene disruption efficiency could be improved by optimization of the levels of Cas9 and gRNA expression. Hlavová et al. (Biotechnol. Adv. 2015) discusses development of species or strains of microalgae using techniques such as CRISPR to target nuclear and chloroplast genes for insertional mutagenesis and screening. The methods of Stovicek and Hlavová may be applied to the Cpf1 effector protein system of the present invention.

[1248] U.S. Pat. No. 8,945,839 describes a method for engineering Micro-Algae (Chlamydomonas reinhardtii cells) species) using Cas9. Using similar tools, the methods of the Cpf1 CRISPR system described herein can be applied on Chlamydomonas species and other algae. In particular embodiments, Cpf1 and guide RNA are introduced in algae expressed using a vector that expresses Cpf1 under the control of a constitutive promoter such as Hsp70A-Rbc S2 or Beta2-tubulin. Guide RNA will be delivered using a vector containing T7 promoter. Alternatively, Cpf1 mRNA and in vitro transcribed guide RNA can be delivered to algal cells. Electroporation protocol follows standard recommended protocol from the GeneArt Chlamydomonas Engineering kit.

### The Use of Cpf1 in the Generation of Micro-Organisms Capable of Fatty Acid Production

[1249] In particular embodiments, the methods of the invention are used for the generation of genetically engineered micro-organisms capable of the production of fatty esters, such as fatty acid methyl esters (“FAME”) and fatty acid ethyl esters (“FAEE”),

[1250] Typically, host cells can be engineered to produce fatty esters from a carbon source, such as an alcohol, present in the medium, by expression or overexpression of a gene encoding a thioesterase, a gene encoding an acyl-CoA synthase, and a gene encoding an ester synthase. Accordingly, the methods provided herein are used to modify a micro-organisms so as to overexpress or introduce a thioesterase gene, a gene encoding an acyl-CoA synthase, and a gene encoding an ester synthase. In particular embodiments, the thioesterase gene is selected from tesA, ′tesA, tesB, fatB, fatB2, fatB3, fatA1, or fatA. In particular embodiments, the gene encoding an acyl-CoA synthase is selected from fadDJadK, BH3103, pfl-4354, EAV15023, fadD1, fadD2, RPC_4074, fadDD35, fadDD22, faa39, or an identified gene encoding an enzyme having the same properties. In particular embodiments, the gene encoding an ester synthase is a gene encoding a synthase/acyl-CoA:diacylglycerl acyltransferase from Simmondsia chinensis, Acinetobacter sp. ADP, Alcanivorax borkumensis, Pseudomonas aeruginosa, Fundibacter jadensis, Arabidopsis thaliana, or Alkaligenes eutrophus, or a variant thereof. Additionally or alternatively, the methods provided herein are used to decrease expression in said micro-organism of at least one of a gene encoding an acyl-CoA dehydrogenase, a gene encoding an outer membrane protein receptor, and a gene encoding a transcriptional regulator of fatty acid biosynthesis. In particular embodiments one or more of these genes is inactivated, such as by introduction of a mutation. In particular embodiments, the gene encoding an acyl-CoA dehydrogenase is fadE. In particular embodiments, the gene encoding a transcriptional regulator of fatty acid biosynthesis encodes a DNA transcription repressor, for example, fabR.

[1251] Additionally or alternatively, said micro-organism is modified to reduce expression of at least one of a gene encoding a pyruvate formate lyase, a gene encoding a lactate dehydrogenase, or both. In particular embodiments, the gene encoding a pyruvate formate lyase is pflB. In particular embodiments, the gene encoding a lactate dehydrogenase is IdhA. In particular embodiments one or more of these genes is inactivated, such as by introduction of a mutation therein.

[1252] In particular embodiments, the micro-organism is selected from the genus Escherichia, Bacillus, Lactobacillus, Rhodococcus, Synechococcus, Synechoystis, Pseudomonas, Aspergillus, Trichoderma, Neurospora, Fusarium, Humicola, Rhizomucor, Kluyveromyces, Pichia, Mucor, Myceliophtora, Penicillium, Phanerochaete, Pleurotus, Trametes, Chrysosporium, Saccharomyces, Stenotrophamonas, Schizosaccharomyces, Yarrowia, or Streptomyces.

### The Use of Cpf1 in the Generation of Micro-Organisms Capable of Organic Acid Production

[1253] The methods provided herein are further used to engineer micro-organisms capable of organic acid production, more particularly from pentose or hexose sugars. In particular embodiments, the methods comprise introducing into a micro-organism an exogenous LDH gene. In particular embodiments, the organic acid production in said micro-organisms is additionally or alternatively increased by inactivating endogenous genes encoding proteins involved in an endogenous metabolic pathway which produces a metabolite other than the organic acid of interest and/or wherein the endogenous metabolic pathway consumes the organic acid. In particular embodiments, the modification ensures that the production of the metabolite other than the organic acid of interest is reduced. According to particular embodiments, the methods are used to introduce at least one engineered gene deletion and/or inactivation of an endogenous pathway in which the organic acid is consumed or a gene encoding a product involved in an endogenous pathway which produces a metabolite other than the organic acid of interest. In particular embodiments, the at least one engineered gene deletion or inactivation is in one or more gene encoding an enzyme selected from the group consisting of pyruvate decarboxylase (pdc), fumarate reductase, alcohol dehydrogenase (adh), acetaldehyde dehydrogenase, phosphoenolpyruvate carboxylase (ppc), D-lactate dehydrogenase (d-ldh), L-lactate dehydrogenase (l-ldh), lactate 2-monooxygenase. In further embodiments the at least one engineered gene deletion and/or inactivation is in an endogenous gene encoding pyruvate decarboxylase (pdc).

[1254] In further embodiments, the micro-organism is engineered to produce lactic acid and the at least one engineered gene deletion and/or inactivation is in an endogenous gene encoding lactate dehydrogenase. Additionally or alternatively, the micro-organism comprises at least one engineered gene deletion or inactivation of an endogenous gene encoding a cytochrome-dependent lactate dehydrogenase, such as a cytochrome B2-dependent L-lactate dehydrogenase.

### The Use of Cpf1 in the Generation of Improved Xylose or Cellobiose Utilizing Yeasts Strains

[1255] In particular embodiments, the Cpf1 CRISPR system may be applied to select for improved xylose or cellobiose utilizing yeast strains, Error-prone PCR can be used to amplify one (or more) genes involved in the xylose utilization or cellobiose utilization pathways. Examples of genes involved in xylose utilization pathways and cellobiose utilization pathways may include, without limitation, those described in Ha, S. J., et al. (2011) Proc. Natl. Acad. Sci. USA 108(2):504-9 and Galazka, J. M., et al. (2010) Science 330(6000):84-6. Resulting libraries of double-stranded DNA molecules, each comprising a random mutation in such a selected gene could be co-transformed with the components of the Cpf1 CRISPR system into a yeast strain (for instance S288C) and strains can be selected with enhanced xylose or cellobiose utilization capacity, as described in WO2015138855.

### The Use of Cpf1 in the Generation of Improved Yeasts Strains for Use in Isoprenoid Biosynthesis

[1256] Tadas Jakociūnas et al. described the successful application of a multiplex CRISPR/Cas9 system for genome engineering of up to 5 different genomic loci in one transformation step in baker's yeast Saccharomyces cerevisiae (Metabolic Engineering Volume 28, March 2015, Pages 213-222) resulting in strains with high mevalonate production, a key intermediate for the industrially important isoprenoid biosynthesis pathway. In particular embodiments, the Cpf1 CRISPR system may be applied in a multiplex genome engineering method as described herein for identifying additional high producing yeast strains for use in isoprenoid synthesis.

### The Use of Cpf1 in the Generation of Lactic Acid Producing Yeasts Strains

[1257] In another embodiment, successful application of a multiplex Cpf1 CRISPR system is encompassed. In analogy with Vratislav Stovicek et al. (Metabolic Engineering Communications, Volume 2, December 2015, Pages 13-2), improved lactic acid-producing strains can be designed and obtained in a single transformation event. In a particular embodiment, the Cpf1. CRISPR system is used for simultaneously inserting the heterologous lactate dehydrogenase gene and disruption of two endogenous genes PDC1 and PDC5 genes.

### Further Applications of the Cpf1 CRISPR System in Plants

[1258] In particular embodiments, the CRISPR system, and preferably the Cpf1 CRISPR system described herein, can be used for visualization of genetic element dynamics. For example, CRISPR imaging can visualize either repetitive or non-repetitive genomic sequences, report telomere length change and telomere movements and monitor the dynamics of gene loci throughout the cell cycle (Chen et al., Cell, 2013). These methods may also be applied to plants.

[1259] Other applications of the CRISPR system, and preferably the Cpf1 CRISPR system described herein, is the targeted gene disruption positive-selection screening in vitro and in vivo (Malina et al., Genes and Development, 2013). These methods may also be applied to plants.

[1260] In particular embodiments, fusion of inactive Cpf1 endonucleases with histone-modifying enzymes can introduce custom changes in the complex epigenome (Rusk et al., Nature Methods, 2014). These methods may also be applied to plants.

[1261] In particular embodiments, the CRISPR system, and preferably the Cpf1 CRISPR system described herein, can be used to purify a specific portion of the chromatin and identify the associated proteins, thus elucidating their regulatory roles in transcription (Waldrip et al., Epigenetics, 2014). These methods may also be applied to plants.

[1262] In particular embodiments, present invention can be used as a therapy for virus removal in plant systems as it is able to cleave both viral DNA and RNA. Previous studies in human systems have demonstrated the success of utilizing CRISPR in targeting the single strand RNA virus, hepatitis C (A. Price, et al., Proc. Natl. Acad. Sci, 2015) as well as the double stranded DNA virus, hepatitis B (V. Ramanan, et al., Sci. Rep, 2015). These methods may also be adapted for using the Cpf1 CRISPR system in plants.

[1263] In particular embodiments, present invention could be used to alter genome complexicity. In further particular embodiment, the CRISPR system, and preferably the Cpf1 CRISPR system described herein, can be used to disrupt or alter chromosome number and generate haploid plants, which only contain chromosomes from one parent. Such plants can be induced to undergo chromosome duplication and converted into diploid plants containing only homozygous alleles (Karimi-Ashtiyani et al., PNAS, 2015; Anton et al., Nucleus, 2014). These methods may also be applied to plants.

[1264] In particular embodiments, the Cpf1 CRISPR system described herein, can be used for self-cleavage. In these embodiments, the promotor of the Cpf1 enzyme and gRNA can be a constitutive promotor and a second gRNA is introduced in the same transformation cassette, but controlled by an inducible promoter. This second gRNA can be designated to induce site-specific cleavage in the Cpf1 gene in order to create a non-functional Cpf1. In a further particular embodiment, the second gRNA induces cleavage on both ends of the transformation cassette, resulting in the removal of the cassette from the host genome. This system offers a controlled duration of cellular exposure to the Cas enzyme and further minimizes off-target editing. Furthermore, cleavage of both ends of a CRISPR/Cas cassette can be used to generate transgene-free T0 plants with bi-allelic mutations (as described for Cas9 e.g. Moore et al., Nucleic Acids Research, 2014; Schaeffer et al., Plant Science, 2015). The methods of Moore et al. may be applied to the Cpf1 CRISPR systems described herein. Sugano et al. (Plant Cell Physiol. 2014 March; 55(3):475-81. doi: 10.1093/pcp/pcu014. Epub 2014 Jan. 18) reports the application of CRISPR-Cas9 to targeted mutagenesis in the liverwort Marchantia polymorpha L., which has emerged as a model species for studying land plant evolution. The U6 promoter of M. polymorpha was identified and cloned to express the gRNA. The target sequence of the gRNA was designed to disrupt the gene encoding auxin response factor 1 (ARF1) in M. polymorpha. Using Agrobacterium-mediated transformation, Sugano et al. isolated stable mutants in the gametophyte generation of M. polymorpha. CRISPR-Cas9-based site-directed mutagenesis in vivo was achieved using either the Cauliflower mosaic virus 35S or M. polymorpha EF1α promoter to express Cas9. Isolated mutant individuals showing an auxin-resistant phenotype were not chimeric. Moreover, stable mutants were produced by asexual reproduction of T1 plants. Multiple arf1 alleles were easily established using CRIPSR-Cas9-based targeted mutagenesis. The methods of Sugano et al. may be applied to the Cpf1 effector protein system of the present invention.

[1265] Kabadi et al. (Nucleic Acids Res. 2014 Oct. 29; 42(19):e147. doi: 10.1093/nar/gku749. Epub 2014 Aug. 13) developed a single lentiviral system to express a Cas9 variant, a reporter gene and up to four sgRNAs from independent RNA polymerase III promoters that are incorporated into the vector by a convenient Golden Gate cloning method. Each sgRNA was efficiently expressed and can mediate multiplex gene editing and sustained transcriptional activation in immortalized and primary human cells. The methods of Kabadi et al. may be applied to the Cpf1 effector protein system of the present invention.

[1266] Ling et al. (BMC Plant Biology 2014, 14:327) developed a CRISPR-Cas9 binary vector set based on the pGreen or pCAMBIA backbone, as well as a gRNA This toolkit requires no restriction enzymes besides BsaI to generate final constructs harboring maize-codon optimized Cas9 and one or more gRNAs with high efficiency in as little as one cloning step. The toolkit was validated using maize protoplasts, transgenic maize lines, and transgenic Arabidopsis lines and was shown to exhibit high efficiency and specificity. More importantly, using this toolkit, targeted mutations of three Arabidopsis genes were detected in transgenic seedlings of the T1 generation. Moreover, the multiple-gene mutations could be inherited by the next generation. (guide RNA) module vector set, as a toolkit for multiplex genome editing in plants. The toolbox of Lin et al. may be applied to the Cpf1 effector protein system of the present invention.

[1267] Protocols for targeted plant genome editing via CRISPR-Cpf1 are also available based on those disclosed for the CRISPR-Cas9 system in volume 1284 of the series Methods in Molecular Biology pp 239-255 10 Feb. 2015. A detailed procedure to design, construct, and evaluate dual gRNAs for plant codon optimized Cas9 (pcoCas9) mediated genome editing using Arabidopsis thaliana and Nicotiana benthamiana protoplasts s model cellular systems are described. Strategies to apply the CRISPR-Cas9 system to generating targeted genome modifications in whole plants are also discussed. The protocols described in the chapter may be applied to the Cpf1 effector protein system of the present invention.

[1268] Petersen (“Towards precisely glycol engineered plants,” Plant Biotech Denmark Annual meeting 2015, Copenhagen, Denmark) developed a method of using CRISPR/Cas9 to engineer genome changes in Arabidopsis, for example to glyco engineer Arabidopsis for production of proteins and products having desired posttranslational modifications. Hebelstrup et al. (Front Plant Sci. 2015 Apr. 23; 6:247) outlines in planta starch bioengineering, providing crops that express starch modifying enzymes and directly produce products that normally are made by industrial chemical and/or physical treatments of starches. The methods of Petersen and Hebelstrup may be applied to the Cpf1 effector protein system of the present invention.

[1269] Ma et al. (Mol Plant. 2015 Aug. 3; 8(8): 1274-84. doi: 10.1016/j.molp.2015.04.007) reports robust CRISPR-Cas9 vector system, utilizing a plant codon optimized Cas9 gene, for convenient and high-efficiency multiplex genome editing in monocot and dicot plants. Ma et al. designed PCR-based procedures to rapidly generate multiple sgRNA expression cassettes, which can be assembled into the binary CRISPR-Cas9 vectors in one round of cloning by Golden Gate ligation or Gibson Assembly. With this system, Ma et al. edited 46 target sites in rice with an average 85.4% rate of mutation, mostly in biallelic and homozygous status. Ma et al. provide examples of loss-of-function gene mutations in T0 rice and T1 Arabidopsis plants by simultaneous targeting of multiple (up to eight) members of a gene family, multiple genes in a biosynthetic pathway, or multiple sites in a single gene. The methods of Ma et al. may be applied to the Cpf1 effector protein system of the present invention.

[1270] Lowder et al. (Plant Physiol. 2015 Aug. 21. pii: pp. 00636.2015) also developed a CRISPR-Cas9 toolbox enables multiplex genome editing and transcriptional regulation of expressed, silenced or non-coding genes in plants. This toolbox provides researchers with a protocol and reagents to quickly and efficiently assemble functional CRISPR-Cas9 T-DNA constructs for monocots and dicots using Golden Gate and Gateway cloning methods. It comes with a full suite of capabilities, including multiplexed gene editing and transcriptional activation or repression of plant endogenous genes. T-DNA based transformation technology is fundamental to modern plant biotechnology, genetics, molecular biology and physiology. As such, Applicants developed a method for the assembly of Cas9 (WT, nickase or dCas9) and gRNA(s) into a T-DNA destination-vector of interest. The assembly method is based on both Golden Gate assembly and MultiSite Gateway recombination. Three modules are required for assembly. The first module is a Cas9 entry vector, which contains promoterless Cas9 or its derivative genes flanked by attL1 and attR5 sites. The second module is a gRNA entry vector which contains entry gRNA expression cassettes flanked by attL5 and attL2 sites. The third module includes attR1-attR2-containing destination T-DNA vectors that provide promoters of choice for Cas9 expression. The toolbox of Lowder et al. may be applied to the Cpf1 effector protein system of the present invention.

[1271] In an advantageous embodiment, the plant may be a tree. The present invention may also utilize the herein disclosed CRISPR Cas system for herbaceous systems (see, e.g., Belhaj et al., Plant Methods 9: 39 and Harrison et al., Genes & Development 28: 1859-1872). In a particularly advantageous embodiment, the CRISPR Cas system of the present invention may target single nucleotide polymorphisms (SNPs) in trees (see, e.g., Zhou et al., New Phytologist, Volume 208, Issue 2, pages 298-301, October 2015). In the Zhou et al. study, the authors applied a CRISPR Cas system in the woody perennial Populus using the 4-coumarate:CoA ligase (4CL) gene family as a case study and achieved 100% mutational efficiency for two 4CL genes targeted, with every transformant examined carrying biallelic modifications. In the Zhou et al., study, the CRISPR-Cas9 system was highly sensitive to single nucleotide polymorphisms (SNPs), as cleavage for a third 4CL gene was abolished due to SNPs in the target sequence. These methods may be applied to the Cpf1 effector protein system of the present invention.

[1272] The methods of Zhou et al. (New Phytologist, Volume 208, Issue 2, pages 298-301, October 2015) may be applied to the present invention as follows. Two 4CL genes, 4CL1 and 4CL2, associated with lignin and flavonoid biosynthesis, respectively are targeted for CRISPR-Cas9 editing. The Populus tremula×alba clone 717-1B4 routinely used for transformation is divergent from the genome-sequenced Populus trichocarpa. Therefore, the 4CL1 and 4CL2 gRNAs designed from the reference genome are interrogated with in-house 717 RNA-Seq data to ensure the absence of SNPs which could limit Cas efficiency. A third gRNA designed for 4CL5, a genome duplicate of 4CL1, is also included. The corresponding 717 sequence harbors one SNP in each allele near/within the PAM, both of which are expected to abolish targeting by the 4CL5-gRNA. All three gRNA target sites are located within the first exon. For 717 transformation, the gRNA is expressed from the Medicago U6.6 promoter, along with a human codon-optimized Cas under control of the CaMV 35S promoter in a binary vector. Transformation with the Cas-only vector can serve as a control. Randomly selected 4CL1 and 4CL2 lines are subjected to amplicon-sequencing. The data is then processed and biallelic mutations are confirmed in all cases. These methods may be applied to the Cpf1 effector protein system of the present invention.

[1273] In plants, pathogens are often host-specific. For example, Fusarium oxysporum f. sp. lycopersici causes tomato wilt but attacks only tomato, and F. oxysporum f. dianthii Puccinia graminis f sp. tritici attacks only wheat. Plants have existing and induced defenses to resist most pathogens. Mutations and recombination events across plant generations lead to genetic variability that gives rise to susceptibility, especially as pathogens reproduce with more frequency than plants. In plants there can be non-host resistance, e.g., the host and pathogen are incompatible. There can also be Horizontal Resistance, e.g., partial resistance against all races of a pathogen, typically controlled by many genes and Vertical Resistance, e.g., complete resistance to some races of a pathogen but not to other races, typically controlled by a few genes. In a Gene-for-Gene level, plants and pathogens evolve together, and the genetic changes in one balance changes in other. Accordingly, using Natural Variability, breeders combine most useful genes for Yield, Quality, Uniformity, Hardiness, Resistance. The sources of resistance genes include native or foreign Varieties, Heirloom Varieties, Wild Plant Relatives, and Induced Mutations, e.g., treating plant material with mutagenic agents. Using the present invention, plant breeders are provided with a new tool to induce mutations. Accordingly, one skilled in the art can analyze the genome of sources of resistance genes, and in Varieties having desired characteristics or traits employ the present invention to induce the rise of resistance genes, with more precision than previous mutagenic agents and hence accelerate and improve plant breeding programs.

### Improved Plants and Yeast Cells

[1274] The present invention also provides plants and yeast cells obtainable and obtained by the methods provided herein. The improved plants obtained by the methods described herein may be useful in food or feed production through expression of genes which, for instance ensure tolerance to plant pests, herbicides, drought, low or high temperatures, excessive water, etc.

[1275] The improved plants obtained by the methods described herein, especially crops and algae may be useful in food or feed production through expression of, for instance, higher protein, carbohydrate, nutrient or vitamin levels than would normally be seen in the wildtype. In this regard, improved plants, especially pulses and tubers are preferred.

[1276] Improved algae or other plants such as rape may be particularly useful in the production of vegetable oils or biofuels such as alcohols (especially methanol and ethanol), for instance. These may be engineered to express or overexpress high levels of oil or alcohols for use in the oil or biofuel industries.

[1277] The invention also provides for improved parts of a plant. Plant parts include, but are not limited to, leaves, stems, roots, tubers, seeds, endosperm, ovule, and pollen. Plant parts as envisaged herein may be viable, nonviable, regeneratable, and/or non-regeneratable.

[1278] It is also encompassed herein to provide plant cells and plants generated according to the methods of the invention. Gametes, seeds, embryos, either zygotic or somatic, progeny or hybrids of plants comprising the genetic modification, which are produced by traditional breeding methods, are also included within the scope of the present invention. Such plants may contain a heterologous or foreign DNA sequence inserted at or instead of a target sequence. Alternatively, such plants may contain only an alteration (mutation, deletion, insertion, substitution) in one or more nucleotides. As such, such plants will only be different from their progenitor plants by the presence of the particular modification.

[1279] Thus, the invention provides a plant, animal or cell, produced by the present methods, or a progeny thereof. The progeny may be a clone of the produced plant or animal, or may result from sexual reproduction by crossing with other individuals of the same species to introgress further desirable traits into their offspring. The cell may be in vivo or ex vivo in the cases of multicellular organisms, particularly animals or plants.

### Cpf1 Effector Protein Complexes can be Used in Non-Human Organisms/Animals

[1280] The present invention may also be extended to other agricultural applications such as, for example, farm and production animals. For example, pigs have many features that make them attractive as biomedical models, especially in regenerative medicine. In particular, pigs with severe combined immunodeficiency (SCID) may provide useful models for regenerative medicine, xenotransplantation (discussed also elsewhere herein), and tumor development and will aid in developing therapies for human SCID patients. Lee et al., (Proc Natl Acad Sci USA. 2014 May 20; 111(20): 7260-5) utilized a reporter-guided transcription activator-like effector nuclease (TALEN) system to generated targeted modifications of recombination activating gene (RAG) 2 in somatic cells at high efficiency, including some that affected both alleles. The Cpf1 effector protein may be applied to a similar system.

[1281] The methods of Lee et al., (Proc Natl Acad Sci USA. 2014 May 20; 111(20): 7260-5) may be applied to the present invention analogously as follows. Mutated pigs are produced by targeted modification of RAG2 in fetal fibroblast cells followed by SCNT and embryo transfer. Constructs coding for CRISPR Cas and a reporter are electroporated into fetal-derived fibroblast cells. After 48 h, transfected cells expressing the green fluorescent protein are sorted into individual wells of a 96-well plate at an estimated dilution of a single cell per well. Targeted modification of RAG2 are screened by amplifying a genomic DNA fragment flanking any CRISPR Cas cutting sites followed by sequencing the PCR products. After screening and ensuring lack of off-site mutations, cells carrying targeted modification of RAG2 are used for SCNT. The polar body, along with a portion of the adjacent cytoplasm of oocyte, presumably containing the metaphase II plate, are removed, and a donor cell are placed in the perivitelline. The reconstructed embryos are then electrically porated to fuse the donor cell with the oocyte and then chemically activated. The activated embryos are incubated in Porcine Zygote Medium 3 (PZM3) with 0.5 μM Scriptaid (S7817; Sigma-Aldrich) for 14-16 h. Embryos are then washed to remove the Scriptaid and cultured in PZM3 until they were transferred into the oviducts of surrogate pigs.

[1282] The present invention is also applicable to modifying SNPs of other animals, such as cows. Tan et al. (Proc Natl Acad Sci USA. 2013 Oct. 8; 110(41): 16526-16531) expanded the livestock gene editing toolbox to include transcription activator-like (TAL) effector nuclease (TALEN)- and clustered regularly interspaced short palindromic repeats (CRISPR)/Cas9-stimulated homology-directed repair (HDR) using plasmid, rAAV, and oligonucleotide templates. Gene specific gRNA sequences were cloned into the Church lab gRNA vector (Addgene ID: 41824) according to their methods (Mali P, et al. (2013) RNA-Guided Human Genome Engineering via Cas9. Science 339(6121):823-826). The Cas9 nuclease was provided either by co-transfection of the hCas9 plasmid (Addgene ID: 41815) or mRNA synthesized from RCIScript-hCas9. This RCIScript-hCas9 was constructed by sub-cloning the XbaI-AgeI fragment from the hCas9 plasmid (encompassing the hCas9 cDNA) into the RCIScript plasmid.

[1283] Heo et al. (Stem Cells Dev. 2015 Feb. 1; 24(3): 393-402. doi: 10.1089/scd.2014.0278. Epub 2014 Nov. 3) reported highly efficient gene targeting in the bovine genome using bovine pluripotent cells and clustered regularly interspaced short palindromic repeat (CRISPR)/Cas9 nuclease. First, Heo et al. generate induced pluripotent stem cells (iPSCs) from bovine somatic fibroblasts by the ectopic expression of yamanaka factors and GSK3β and MEK inhibitor (2i) treatment. Heo et al. observed that these bovine iPSCs are highly similar to naïve pluripotent stem cells with regard to gene expression and developmental potential in teratomas. Moreover, CRISPR-Cas9 nuclease, which was specific for the bovine NANOG locus, showed highly efficient editing of the bovine genome in bovine iPSCs and embryos.

[1284] Igenity® provides a profile analysis of animals, such as cows, to perform and transmit traits of economic traits of economic importance, such as carcass composition, carcass quality, maternal and reproductive traits and average daily gain. The analysis of a comprehensive Igenity® profile begins with the discovery of DNA markers (most often single nucleotide polymorphisms or SNPs). All the markers behind the Igenity® profile were discovered by independent scientists at research institutions, including universities, research organizations, and government entities such as USDA. Markers are then analyzed at Igenity® in validation populations. Igenity® uses multiple resource populations that represent various production environments and biological types, often working with industry partners from the seedstock, cow-calf, feedlot and/or packing segments of the beef industry to collect phenotypes that are not commonly available. Cattle genome databases are widely available, see, e.g., the NAGRP Cattle Genome Coordination Program (http://www.animalgenome.org/cattle/maps/db.html). Thus, the present invention maybe applied to target bovine SNPs. One of skill in the art may utilize the above protocols for targeting SNPs and apply them to bovine SNPs as described, for example, by Tan et al. or Heo et al.

[1285] Qingjian Zou et al. (Journal of Molecular Cell Biology Advance Access published Oct. 12, 2015) demonstrated increased muscle mass in dogs by targeting targeting the first exon of the dog Myostatin (MSTN) gene (a negative regulator of skeletal muscle mass). First, the efficiency of the sgRNA was validated, using cotransfection of the sgRNA targeting MSTN with a Cas9 vector into canine embryonic fibroblasts (CEFs). Thereafter, MSTN KO dogs were generated by micro-injecting embryos with normal morphology with a mixture of Cas9 mRNA and MSTN sgRNA and auto-transplantation of the zygotes into the oviduct of the same female dog. The knock-out puppies displayed an obvious muscular phenotype on thighs compared with its wild-type littermate sister. This can also be performed using the Cpf1 CRISPR systems provided herein.

### Livestock—Pigs

[1286] Viral targets in livestock may include, in some embodiments, porcine CD163, for example on porcine macrophages. CD163 is associated with infection (thought to be through viral cell entry) by PRRSv (Porcine Reproductive and Respiratory Syndrome virus, an arterivirus). Infection by PRRSv, especially of porcine alveolar macrophages (found in the lung), results in a previously incurable porcine syndrome (“Mystery swine disease” or “blue ear disease”) that causes suffering, including reproductive failure, weight loss and high mortality rates in domestic pigs. Opportunistic infections, such as enzootic pneumonia, meningitis and ear oedema, are often seen due to immune deficiency through loss of macrophage activity. It also has significant economic and environmental repercussions due to increased antibiotic use and financial loss (an estimated $660 m per year).

[1287] As reported by Kristin M Whitworth and Dr Randall Prather et al. (Nature Biotech 3434 published online 7 Dec. 2015) at the University of Missouri and in collaboration with Genus Plc, CD163 was targeted using CRISPR-Cas9 and the offspring of edited pigs were resistant when exposed to PRRSv. One founder male and one founder female, both of whom had mutations in exon 7 of CD163, were bred to produce offspring. The founder male possessed an 11-bp deletion in exon 7 on one allele, which results in a frameshift mutation and missense translation at amino acid 45 in domain 5 and a subsequent premature stop codon at amino acid 64. The other allele had a 2-bp addition in exon 7 and a 377-bp deletion in the preceding intron, which were predicted to result in the expression of the first 49 amino acids of domain 5, followed by a premature stop code at amino acid 85. The sow had a 7 bp addition in one allele that when translated was predicted to express the first 48 amino acids of domain 5, followed by a premature stop codon at amino acid 70. The sow's other allele was unamplifiable. Selected offspring were predicted to be a null animal (CD163−/−), i.e. a CD163 knock out.

[1288] Accordingly, in some embodiments, porcine alveolar macrophages may be targeted by the CRISPR protein. In some embodiments, porcine CD163 may be targeted by the CRISPR protein. In some embodiments, porcine CD163 may be knocked out through induction of a DSB or through insertions or deletions, for example targeting deletion or modification of exon 7, including one or more of those described above, or in other regions of the gene, for example deletion or modification of exon 5.

[1289] An edited pig and its progeny are also envisaged, for example a CD163 knock out pig. This may be for livestock, breeding or modelling purposes (i.e. a porcine model). Semen comprising the gene knock out is also provided.

[1290] CD163 is a member of the scavenger receptor cysteine-rich (SRCR) superfamily. Based on in vitro studies SRCR domain 5 of the protein is the domain responsible for unpackaging and release of the viral genome. As such, other members of the SRCR superfamily may also be targeted in order to assess resistance to other viruses. PRRSV is also a member of the mammalian arterivirus group, which also includes murine lactate dehydrogenase-elevating virus, simian hemorrhagic fever virus and equine arteritis virus. The arteriviruses share important pathogenesis properties, including macrophage tropism and the capacity to cause both severe disease and persistent infection. Accordingly, arteriviruses, and in particular murine lactate dehydrogenase-elevating virus, simian hemorrhagic fever virus and equine arteritis virus, may be targeted, for example through porcine CD163 or homologues thereof in other species, and murine, simian and equine models and knockout also provided.

[1291] Indeed, this approach may be extended to viruses or bacteria that cause other livestock diseases that may be transmitted to humans, such as Swine Influenza Virus (SIV) strains which include influenza C and the subtypes of influenza A known as H1N1, H1N2, H2N1, H3N1, H3N2, and H2N3, as well as pneumonia, meningitis and oedema mentioned above.

Therapeutic Targeting with RNA-Guided Cpf1 Effector Protein Complex

[1292] As will be apparent, it is envisaged that the present system can be used to target any polynucleotide sequence of interest. The invention provides a non-naturally occurring or engineered composition, or one or more polynucleotides encoding components of said composition, or vector or delivery systems comprising one or more polynucleotides encoding components of said composition for use in a modifying a target cell in vivo, ex vivo or in vitro and, may be conducted in a manner alters the cell such that once modified the progeny or cell line of the CRISPR modified cell retains the altered phenotype. The modified cells and progeny may be part of a multi-cellular organism such as a plant or animal with ex vivo or in vivo application of CRISPR system to desired cell types. The CRISPR invention may be a therapeutic method of treatment. The therapeutic method of treatment may comprise gene or genome editing, or gene therapy.

### Treating Pathogens, Like Bacterial, Fungal and Parasitic Pathogens

[1293] The present invention may also be applied to treat bacterial, fungal and parasitic pathogens. Most research efforts have focused on developing new antibiotics, which once developed, would nevertheless be subject to the same problems of drug resistance. The invention provides novel CRISPR-based alternatives which overcome those difficulties. Furthermore, unlike existing antibiotics, CRISPR-based treatments can be made pathogen specific, inducing bacterial cell death of a target pathogen while avoiding beneficial bacteria.

[1294] Jiang et al. (“RNA-guided editing of bacterial genomes using CRISPR-Cas systems,” Nature Biotechnology vol. 31, p. 233-9, March 2013) used a CRISPR-Cas9 system to mutate or kill S. pneumoniae and E. coli. The work, which introduced precise mutations into the genomes, relied on dual-RNA:Cas9-directed cleavage at the targeted genomic site to kill unmutated cells and circumvented the need for selectable markers or counter-selection systems. CRISPR systems have be used to reverse antibiotic resistance and eliminate the transfer of resistance between strains. Bickard et al. showed that Cas9, reprogrammed to target virulence genes, kills virulent, but not avirulent, S. aureus. Reprogramming the nuclease to target antibiotic resistance genes destroyed staphylococcal plasmids that harbor antibiotic resistance genesand immunized against the spread of plasmid-borne resistance genes. (see, Bikard et al., “Exploiting CRISPR-Cas nucleases to produce sequence-specific antimicrobials,” Nature Biotechnology vol. 32, 1146-1150, doi:10.1038/nbt.3043, published online 5 Oct. 2014.) Bikard showed that CRISPR-Cas9 antimicrobials function in vivo to kill S. aureus in a mouse skin colonization model. Similarly, Yosef et al used a CRISPR system to target genes encoding enzymes that confer resistance to β-lactam antibiotics (see Yousef et al., “Temperate and lytic bacteriophages programmed to sensitize and kill antibiotic-resistant bacteria,” Proc. Natl. Acad. Sci. USA, vol. 112, p. 7267-7272, doi: 10.1073/pnas.1500107112 published online May 18, 2015).

[1295] CRISPR systems can be used to edit genomes of parasites that are resistant to other genetic approaches. For example, a CRISPR-Cas9 system was shown to introduce double-stranded breaks into the in the Plasmodium yoelii genome (see, Zhang et al., “Efficient Editing of Malaria Parasite Genome Using the CRISPR/Cas9 System,” mBio. vol. 5, e01414-14, July-August 2014). Ghorbal et al. (“Genome editing in the human malaria parasite Plasmodium falciparum using the CRISPR-Cas9 system,” Nature Biotechnology, vol. 32, p. 819-821, doi: 10.1038/nbt.2925, published online Jun. 1, 2014) modified the sequences of two genes, orc1 and kelch13, which have putative roles in gene silencing and emerging resistance to artemisinin, respectively. Parasites that were altered at the appropriate sites were recovered with very high efficiency, despite there being no direct selection for the modification, indicating that neutral or even deleterious mutations can be generated using this system. CRISPR-Cas9 is also used to modify the genomes of other pathogenic parasites, including Toxoplasma gondii (see Shen et al., “Efficient gene disruption in diverse strains of Toxoplasma gondii using CRISPR/CAS9,” mBio vol. 5:e01114-14, 2014; and Sidik et al., “Efficient Genome Engineering of Toxoplasma gondii Using CRISPR/Cas9,” PLoS One vol. 9, e100450, doi: 10.1371/journal.pone.0100450, published online Jun. 27, 2014).

[1296] Vyas et al. (“A Candida albicans CRISPR system permits genetic engineering of essential genes and gene families,” Science Advances, vol. 1, e1500248, DOI: 10.1126/sciadv.1500248, Apr. 3, 2015) employed a CRISPR system to overcome long-standing obstacles to genetic engineering in C. albicans and efficiently mutate in a single experiment both copies of several different genes. In an organism where several mechanisms contribute to drug resistance, Vyas produced homozygous double mutants that no longer displayed the hyper-resistance to fluconazole or cycloheximide displayed by the parental clinical isolate Can90. Vyas also obtained homozygous loss-of-function mutations in essential genes of C. albicans by creating conditional alleles. Null alleles of DCR1, which is required for ribosomal RNA processing, are lethal at low temperature but viable at high temperature. Vyas used a repair template that introduced a nonsense mutation and isolated dcr1/dcr1 mutants that failed to grow at 16° C.

[1297] The CRISPR system of the present invention for use in P. falciparum by disrupting chromosomal loci. Ghorbal et al. (“Genome editing in the human malaria parasite Plasmodium falciparum using the CRISPR-Cas9 system” Nature Biotechnology, 32, 819-821 (2014), 10.1038/nbt.2925, Jun. 1, 2014) employed a CRISPR system to introduce specific gene knockouts and single-nucleotide substitutions in the malaria genome. To adapt the CRISPR-Cas9 system to P. falciparum, Ghorbal et al. generated expression vectors for under the control of plasmodial regulatory elements in the pUF1-Cas9 episome that also carries the drug-selectable marker ydhodh, which gives resistance to DSM1, a P. falciparum dihydroorotate dehydrogenase (PfDHODH) inhibitor and for transcription of the sgRNA, used P. falciparum U6 small nuclear (sn)RNA regulatory elements placing the guide RNA and the donor DNA template for homologous recombination repair on the same plasmid, pL7. See also, Zhang C. et al. (“Efficient editing of malaria parasite genome using the CRISPR/Cas9 system”, MBio, 2014 Jul. 1; 5(4):E01414-14, doi: 10 1128/MbIO.01414-14) and Wagner et at (“Efficient CRISPR-Cas9-mediated genome editing in Plasmodium falciparum, Nature Methods 11, 915-918 (2014), DOI: 10.1038/nmeth.3063).

### Treating Pathogens, Like Viral Pathogens Such as HIV

[1298] Cas-mediated genome editing might be used to introduce protective mutations in somatic tissues to combat nongenetic or complex diseases. For example, NHEJ-mediated inactivation of the CCR5 receptor in lymphocytes (Lombardo et al., Nat Biotechnol. 2007 November; 25(11):1298-306) may be a viable strategy for circumventing HIV infection, whereas deletion of PCSK9 (Cohen et al., Nat Genet. 2005 February; 37(2):161-5) orangiopoietin (Musunuru et al., N Engl J Med. 2010 Dec. 2; 363(23): 2220-7) may provide therapeutic effects against statin-resistant hypercholesterolemia or hyperlipidemia. Although these targets may be also addressed using siRNA-mediated protein knockdown, a unique advantage of NHEJ-mediated gene inactivation is the ability to achieve permanent therapeutic benefit without the need for continuing treatment. As with all gene therapies, it will of course be important to establish that each proposed therapeutic use has a favorable benefit-risk ratio.

[1299] Hydrodynamic delivery of plasmid DNA encoding Cas9 nd guide RNA along with a repair template into the liver of an adult mouse model of tyrosinemia was shown to be able to correct the mutant Fah gene and rescue expression of the wild-type Fah protein in ˜1 out of 250 cells (Nat Biotechnol. 2014 June; 32(6):551-3). In addition, clinical trials successfully used ZF nucleases to combat HIV infection by ex vivo knockout of the CCR5 receptor. In all patients, HIV DNA levels decreased, and in one out of four patients, HIV RNA became undetectable (Tebas et al., N Engl J Med. 2014 Mar. 6; 370(10): 901-10). Both of these results demonstrate the promise of programmable nucleases as a new therapeutic platform.

[1300] In another embodiment, self-inactivating lentiviral vectors with an siRNA targeting a common exon shared by HIV tat/rev, a nucleolar-localizing TAR decoy, and an anti-CCR5-specific hammerhead ribozyme (see, e.g., DiGiusto et al. (2010) Sci Transl Med 2:36ra43) may be used/and or adapted to the CRISPR-Cas system of the present invention. A minimum of 2.5×10⁶ CD34+ cells per kilogram patient weight may be collected and prestimulated for 16 to 20 hours in X-VIVO 15 medium (Lonza) containing 2 μmol/L-glutamine, stem cell factor (100 ng/ml), Flt-3 ligand (Flt-3L) (100 ng/ml), and thrombopoietin (10 ng/ml) (CellGenix) at a density of 2×10⁶ cells/ml. Prestimulated cells may be transduced with lentiviral at a multiplicity of infection of 5 for 16 to 24 hours in 75-cm² tissue culture flasks coated with fibronectin (25 mg/cm²) (RetroNectin, Takara Bio Inc.).

[1301] With the knowledge in the art and the teachings in this disclosure the skilled person can correct HSCs as to immunodeficiency condition such as HIV/AIDS comprising contacting an HSC with a CRISPR-Cas9 system that targets and knocks out CCR5. An guide RNA (and advantageously a dual guide approach, e.g., a pair of different guide RNAs; for instance, guide RNAs targeting of two clinically relevant genes, B2M and CCR5, in primary human CD4+ T cells and CD34+ hematopoietic stem and progenitor cells (HSPCs)) that targets and knocks out CCR5-and-Cpf1 protein containing particle is contacted with HSCs. The so contacted cells can be administered; and optionally treated/expanded; cf. Cartier. See also Kiem, “Hematopoietic stem cell-based gene therapy for HIV disease,” Cell Stem Cell. Feb. 3, 2012; 10(2): 137-147; incorporated herein by reference along with the documents it cites; Mandal et al, “Efficient Ablation of Genes in Human Hematopoietic Stem and Effector Cells using CRISPR/Cas9,” Cell Stem Cell, Volume 15, Issue 5, p 643-652, 6 Nov. 2014; incorporated herein by reference along with the documents it cites. Mention is also made of Ebina, “CRISPR/Cas9 system to suppress HIV-1 expression by editing HIV-1 integrated proviral DNA” SCIENTIFIC REPORTS|3: 2510|DOI: 10.1038/srep02510, incorporated herein by reference along with the documents it cites, as another means for combatting HIV/AIDS using a CRISPR-Cpf1 system.

[1302] The rationale for genome editing for HIV treatment originates from the observation that individuals homozygous for loss of function mutations in CCR5, a cellular co-receptor for the virus, are highly resistant to infection and otherwise healthy, suggesting that mimicking this mutation with genome editing could be a safe and effective therapeutic strategy [Liu, R., et al. Cell 86, 367-377 (1996)]. This idea was clinically validated when an HIV infected patient was given an allogeneic bone marrow transplant from a donor homozygous for a loss of function CCR5 mutation, resulting in undetectable levels of HIV and restoration of normal CD4 T-cell counts [Hutter, G., et al. The New England journal of medicine 360, 692-698 (2009)]. Although bone marrow transplantation is not a realistic treatment strategy for most HIV patients, due to cost and potential graft vs. host disease, HIV therapies that convert a patient's own T-cells into CCR5 are desirable.

[1303] Early studies using ZFNs and NHEJ to knockout CCR5 in humanized mouse models of HIV showed that transplantation of CCR5 edited CD4 T cells improved viral load and CD4 T-cell counts [Perez, E. E., et al. Nature biotechnology 26, 808-816 (2008)]. Importantly, these models also showed that HIV infection resulted in selection for CCR5 null cells, suggesting that editing confers a fitness advantage and potentially allowing a small number of edited cells to create a therapeutic effect.

[1304] As a result of this and other promising preclinical studies, genome editing therapy that knocks out CCR5 in patient T cells has now been tested in humans [Holt, N., et al. Nature biotechnology 28, 839-847 (2010); Li, L., et al. Molecular therapy: the journal of the American Society of Gene Therapy 21, 1259-1269 (2013)]. In a recent phase I clinical trial, CD4+ T cells from patients with HIV were removed, edited with ZFNs designed to knockout the CCR5 gene, and autologously transplanted back into patients [Tebas, P., et al. The New England journal of medicine 370, 901-910 (2014)].

[1305] In another study (Mandal et al., Cell Stem Cell, Volume 15, Issue 5, p 643-652, 6 Nov. 2014), CRISPR-Cas9 has targeted two clinical relevant genes, B2M and CCR5, in human CD4+ T cells and CD34+ hematopoietic stem and progenitor cells (HSPCs). Use of single RNA guides led to highly efficient mutagenesis in HSPCs but not in T cells. A dual guide approach improved gene deletion efficacy in both cell types. HSPCs that had undergone genome editing with CRISPR-Cas9 retained multilineage potential. Predicted on- and off-target mutations were examined via target capture sequencing in HSPCs and low levels of off-target mutagenesis were observed at only one site. These results demonstrate that CRISPR-Cas9 can efficiently ablate genes in HSPCs with minimal off-target mutagenesis, which have broad applicability for hematopoietic cell-based therapy.

[1306] Wang et al. (PLoS One. 2014 Dec. 26; 9(12):e115987. doi: 10.1371/journal.pone.0115987) silenced CCR5 via CRISPR associated protein 9 (Cas9) and single guided RNAs (guide RNAs) with lentiviral vectors expressing Cas9 and CCR5 guide RNAs. Wang et al. showed that a single round transduction of lentiviral vectors expressing Cas9 and CCR5 guide RNAs into HIV-1 susceptible human CD4+ cells yields high frequencies of CCR5 gene disruption. CCR5 gene-disrupted cells are not only resistant to R5-tropic HIV-1, including transmitted/founder (T/F) HIV-1 isolates, but also have selective advantage over CCR5 gene-undisrupted cells during R5-tropic HIV-1 infection. Genome mutations at potential off-target sites that are highly homologous to these CCR5 guide RNAs in stably transduced cells even at 84 days post transduction were not detected by a T7 endonuclease I assay.

[1307] Fine et al. (Sci Rep. 2015 Jul. 1; 5:10777. doi: 10.1038/srep10777) identified a two-cassette system expressing pieces of the S. pyogenes Cas9 (SpCas9) protein which splice together in cellula to form a functional protein capable of site-specific DNA cleavage. With specific CRISPR guide strands, Fine et al. demonstrated the efficacy of this system in cleaving the HBB and CCR5 genes in human HEK-293T cells as a single Cas9 and as a pair of Cas9 nickases. The trans-spliced SpCas9 (tsSpCas9) displayed ˜35% of the nuclease activity compared with the wild-type SpCas9 (wtSpCas9) at standard transfection doses, but had substantially decreased activity at lower dosing levels. The greatly reduced open reading frame length of the tsSpCas9 relative to wtSpCas9 potentially allows for more complex and longer genetic elements to be packaged into an AAV vector including tissue-specific promoters, multiplexed guide RNA expression, and effector domain fusions to SpCas9.

Li et al. (J Gen Virol. 2015 August; 96(8):2381-93. doi: 10.1099/vir.0.000139. Epub 2015 Apr. 8) demonstrated that CRISPR-Cas9 can efficiently mediate the editing of the CCR5 locus in cell lines, resulting in the knockout of CCR5 expression on the cell surface. Next-generation sequencing revealed that various mutations were introduced around the predicted cleavage site of CCR5. For each of the three most effective guide RNAs that were analyzed, no significant off-target effects were detected at the 15 top-scoring potential sites. By constructing chimeric Ad5F35 adenoviruses carrying CRISPR-Cas9 components, Li et al. efficiently transduced primary CD4+ T-lymphocytes and disrupted CCR5 expression, and the positively transduced cells were conferred with HIV-1 resistance.

[1308] One of skill in the art may utilize the above studies of, for example, Holt, N., et al. Nature biotechnology 28, 839-847 (2010), Li, L., et al. Molecular therapy: the journal of the American Society of Gene Therapy 21, 1259-1269 (2013), Mandal et al., Cell Stem Cell, Volume 15, Issue 5, p 643-652, 6 Nov. 2014, Wang et al. (PLoS One. 2014 Dec. 26; 9(12):e115987. doi: 10.1371/journal.pone.0115987), Fine et al. (Sci Rep. 2015 Jul. 1; 5:10777. doi: 10.1038/srep10777) and Li et al. (J Gen Virol. 2015 August; 96(8):2381-93. doi: 10.1099/vir.0.000139. Epub 2015 Apr. 8) for targeting CCR5 with the CRISPR Cas system of the present invention.

### Treating Pathogens, Like Viral Pathogens, Such as HBV

[1309] The present invention may also be applied to treat hepatitis B virus (HBV). However, the CRISPR Cas system must be adapted to avoid the shortcomings of RNAi, such as the risk of oversatring endogenous small RNA pathways, by for example, optimizing dose and sequence (see, e.g., Grimm et al., Nature vol. 441, 26 May 2006). For example, low doses, such as about 1-10×10¹⁴ particles per human are contemplated. In another embodiment, the CRISPR Cas system directed against HBV may be administered in liposomes, such as a stable nucleic-acid-lipid particle (SNALP) (see, e.g., Morrissey et al., Nature Biotechnology, Vol. 23, No. 8, August 2005). Daily intravenous injections of about 1, 3 or 5 mg/kg/day of CRISPR Cas targeted to HBV RNA in a SNALP are contemplated. The daily treatment may be over about three days and then weekly for about five weeks. In another embodiment, the system of Chen et al. (Gene Therapy (2007) 14, 11-19) may be used/and or adapted for the CRISPR Cas system of the present invention. Chen et al. use a double-stranded adenoassociated virus 8-pseudotyped vector (dsAAV2/8) to deliver shRNA. A single administration of dsAAV2/8 vector (1×10¹² vector genomes per mouse), carrying HBV-specific shRNA, effectively suppressed the steady level of HBV protein, mRNA and replicative DNA in liver of HBV transgenic mice, leading to up to 2-3 log₁₀ decrease in HBV load in the circulation. Significant HBV suppression sustained for at least 120 days after vector administration. The therapeutic effect of shRNA was target sequence dependent and did not involve activation of interferon. For the present invention, a CRISPR Cas system directed to HBV may be cloned into an AAV vector, such as a dsAAV2/8 vector and administered to a human, for example, at a dosage of about 1×10¹⁵ vector genomes to about 1×10¹⁶ vector genomes per human. In another embodiment, the method of Wooddell et al. (Molecular Therapy vol. 21 no. 5, 973-985 May 2013) may be used/and or adapted to the CRISPR Cas system of the present invention. Woodell et al. show that simple coinjection of a hepatocyte-targeted, N-acetylgalactosamine-conjugated melittin-like peptide (NAG-MLP) with a liver-tropic cholesterol-conjugated siRNA (chol-siRNA) targeting coagulation factor VII (F7) results in efficient F7 knockdown in mice and nonhuman primates without changes in clinical chemistry or induction of cytokines. Using transient and transgenic mouse models of HBV infection, Wooddell et al. show that a single coinjection of NAG-MLP with potent chol-siRNAs targeting conserved HBV sequences resulted in multilog repression of viral RNA, proteins, and viral DNA with long duration of effect. Intraveinous coinjections, for example, of about 6 mg/kg of NAG-MLP and 6 mg/kg of HBV specific CRISPR Cas may be envisioned for the present invention. In the alternative, about 3 mg/kg of NAG-MLP and 3 mg/kg of HBV specific CRISPR Cas may be delivered on day one, followed by administration of about 2-3 mg/kg of NAG-MLP and 2-3 mg/kg of HBV specific CRISPR Cas two weeks later.

[1310] Lin et al. (Mol Ther Nucleic Acids. 2014 Aug. 19; 3:e186. doi: 10.1038/mtna.2014.38) designed eight gRNAs against HBV of genotype A. With the HBV-specific gRNAs, the CRISPR-Cas9 system significantly reduced the production of HBV core and surface proteins in Huh-7 cells transfected with an HBV-expression vector. Among eight screened gRNAs, two effective ones were identified. One gRNA targeting the conserved HBV sequence acted against different genotypes. Using a hydrodynamics-HBV persistence mouse model, Lin et al. further demonstrated that this system could cleave the intrahepatic HBV genome-containing plasmid and facilitate its clearance in vivo, resulting in reduction of serum surface antigen levels. These data suggest that the CRISPR-Cas9 system could disrupt the HBV-expressing templates both in vitro and in vivo, indicating its potential in eradicating persistent HBV infection.

[1311] Dong et al. (Antiviral Res. 2015 June; 118:110-7. doi: 10.1016/j.antiviral.2015.03.015. Epub 2015 Apr. 3) used the CRISPR-Cas9 system to target the HBV genome and efficiently inhibit HBV infection. Dong et al. synthesized four single-guide RNAs (guide RNAs) targeting the conserved regions of HBV. The expression of these guide RNAS with Cas9 reduced the viral production in Huh7 cells as well as in HBV-replication cell HepG2.2.15. Dong et al. further demonstrated that CRISPR-Cas9 direct cleavage and cleavage-mediated mutagenesis occurred in HBV cccDNA of transfected cells. In the mouse model carrying HBV cccDNA, injection of guide RNA-Cas9 plasmids via rapid tail vein resulted in the low level of cccDNA and HBV protein.

[1312] Liu et al. (J Gen Virol. 2015 August; 96(8):2252-61. doi: 10.1099/vir.0.000159. Epub 2015 Apr. 22) designed eight guide RNAs (gRNAs) that targeted the conserved regions of different HBV genotypes, which could significantly inhibit HBV replication both in vitro and in vivo to investigate the possibility of using the CRISPR-Cas9 system to disrupt the HBV DNA templates. The HBV-specific gRNA/Cpf1 system could inhibit the replication of HBV of different genotypes in cells, and the viral DNA was significantly reduced by a single gRNA/Cpf1 system and cleared by a combination of different gRNA/Cpf1 systems.

[1313] Wang et al. (World J Gastroenterol. 2015 Aug. 28; 21(32): 9554-65. doi: 10.3748/wjg.v21.i32.9554) designed 15 gRNAs against HBV of genotypes A-D. Eleven combinations of two above gRNAs (dual-gRNAs) covering the regulatory region of HBV were chosen. The efficiency of each gRNA and 11 dual-gRNAs on the suppression of HBV (genotypes A-D) replication was examined by the measurement of HBV surface antigen (HBsAg) or e antigen (HBeAg) in the culture supernatant. The destruction of HBV-expressing vector was examined in HuH7 cells co-transfected with dual-gRNAs and HBV-expressing vector using polymerase chain reaction (PCR) and sequencing method, and the destruction of cccDNA was examined in HepAD38 cells using KCl precipitation, plasmid-safe ATP-dependent DNase (PSAD) digestion, rolling circle amplification and quantitative PCR combined method. The cytotoxicity of these gRNAs was assessed by a mitochondrial tetrazolium assay. All of gRNAs could significantly reduce HBsAg or HBeAg production in the culture supernatant, which was dependent on the region in which gRNA against. All of dual gRNAs could efficiently suppress HBsAg and/or HBeAg production for HBV of genotypes A-D, and the efficacy of dual gRNAs in suppressing HBsAg and/or HBeAg production was significantly increased when compared to the single gRNA used alone. Furthermore, by PCR direct sequencing we confirmed that these dual gRNAs could specifically destroy HBV expressing template by removing the fragment between the cleavage sites of the two used gRNAs. Most importantly, gRNA-5 and gRNA-12 combination not only could efficiently suppressing HBsAg and/or HBeAg production, but also destroy the cccDNA reservoirs in HepAD38 cells.

[1314] Karimova et al. (Sci Rep. 2015 Sep. 3; 5:13734. doi: 10.1038/srep13734) identified cross-genotype conserved HBV sequences in the S and X region of the HBV genome that were targeted for specific and effective cleavage by a Cas9 nickase. This approach disrupted not only episomal cccDNA and chromosomally integrated HBV target sites in reporter cell lines, but also HBV replication in chronically and de novo infected hepatoma cell lines.

[1315] One of skill in the art may utilize the above studies of, for example, Lin et al. (Mol Ther Nucleic Acids. 2014 Aug. 19; 3:e186. doi: 10.1038/mtna.2014.38), Dong et al. (Antiviral Res. 2015 June; 118:110-7. doi: 10.1016/j.antiviral.2015.03.015. Epub 2015 Apr. 3), Liu et al. (J Gen Virol. 2015 August; 96(8):2252-61. doi: 10.1099/vir.0.000159. Epub 2015 Apr. 22), Wang et al. (World J Gastroenterol. 2015 Aug. 28; 21(32): 9554-65. doi: 10.3748/wjg.v21.i32.9554) and Karimova et al. (Sci Rep. 2015 Sep. 3; 5:13734. doi: 10.1038/srep13734) for targeting HBV with the CRISPR Cas system of the present invention.

[1316] Chronic hepatitis B virus (HBV) infection is prevalent, deadly, and seldom cured due to the persistence of viral episomal DNA (cccDNA) in infected cells. Ramanan et al. (Ramanan V, Shlomai A, Cox D B, Schwartz R E, Michailidis E, Bhatta A, Scott D A, Zhang F, Rice C M, Bhatia S N, Sci Rep. 2015 Jun. 2; 5:10833. doi: 10.1038/srep10833, published online 2 Jun. 2015.) showed that the CRISPR/Cas9 system can specifically target and cleave conserved regions in the HBV genome, resulting in robust suppression of viral gene expression and replication. Upon sustained expression of Cas9 and appropriately chosen guide RNAs, they demonstrated cleavage of cccDNA by Cas9 and a dramatic reduction in both cccDNA and other parameters of viral gene expression and replication. Thus, they showed that directly targeting viral episomal DNA is a novel therapeutic approach to control the virus and possibly cure patients. This is also described in WO2015089465 A1, in the name of The Broad Institute et al., the contents of which are hereby incorporated by reference

[1317] As such targeting viral episomal DNA in HBV is preferred in some embodiments.

[1318] The present invention may also be applied to treat pathogens, e.g. bacterial, fungal and parasitic pathogens. Most research efforts have focused on developing new antibiotics, which once developed, would nevertheless be subject to the same problems of drug resistance. The invention provides novel CRISPR-based alternatives which overcome those difficulties. Furthermore, unlike existing antibiotics, CRISPR-based treatments can be made pathogen specific, inducing bacterial cell death of a target pathogen while avoiding beneficial bacteria.

[1319] The present invention may also be applied to treat hepatitis C virus (HCV). The methods of Roelvinki et al. (Molecular Therapy vol. 20 no. 9, 1737-1749 September 2012) may be applied to the CRISPR Cas system. For example, an AAV vector such as AAV8 may be a contemplated vector and for example a dosage of about 1.25×1011 to 1.25×1013 vector genomes per kilogram body weight (vg/kg) may be contemplated. The present invention may also be applied to treat pathogens, e.g. bacterial, fungal and parasitic pathogens. Most research efforts have focused on developing new antibiotics, which once developed, would nevertheless be subject to the same problems of drug resistance. The invention provides novel CRISPR-based alternatives which overcome those difficulties. Furthermore, unlike existing antibiotics, CRISPR-based treatments can be made pathogen specific, inducing bacterial cell death of a target pathogen while avoiding beneficial bacteria.

[1320] Jiang et al. (“RNA-guided editing of bacterial genomes using CRISPR-Cas systems,” Nature Biotechnology vol. 31, p. 233-9, March 2013) used a CRISPR-Cas9 system to mutate or kill S. pneumoniae and E. coli. The work, which introduced precise mutations into the genomes, relied on dual-RNA:Cas9-directed cleavage at the targeted genomic site to kill unmutated cells and circumvented the need for selectable markers or counter-selection systems. CRISPR systems have be used to reverse antibiotic resistance and eliminate the transfer of resistance between strains. Bickard et al. showed that Cas9, reprogrammed to target virulence genes, kills virulent, but not avirulent, S. aureus. Reprogramming the nuclease to target antibiotic resistance genes destroyed staphylococcal plasmids that harbor antibiotic resistance genes and immunized against the spread of plasmid-borne resistance genes. (see, Bikard et al., “Exploiting CRISPR-Cas nucleases to produce sequence-specific antimicrobials,” Nature Biotechnology vol. 32, 1146-1150, doi:10.1038/nbt.3043, published online 5 Oct. 2014.) Bikard showed that CRISPR-Cas9 antimicrobials function in vivo to kill S. aureus in a mouse skin colonization model. Similarly, Yosef et al used a CRISPR system to target genes encoding enzymes that confer resistance to β-lactam antibiotics (see Yousef et al., “Temperate and lytic bacteriophages programmed to sensitize and kill antibiotic-resistant bacteria,” Proc. Natl. Acad. Sci. USA, vol. 112, p. 7267-7272, doi: 10.1073/pnas.1500107112 published online May 18, 2015).

[1321] CRISPR systems can be used to edit genomes of parasites that are resistant to other genetic approaches. For example, a CRISPR-Cas9 system was shown to introduce double-stranded breaks into the in the Plasmodium yoelii genome (see, Zhang et al., “Efficient Editing of Malaria Parasite Genome Using the CRISPR/Cas9 System,” mBio. vol. 5, e01414-14, July-August 2014). Ghorbal et al. (“Genome editing in the human malaria parasite Plasmodium falciparum using the CRISPR-Cas9 system,” Nature Biotechnology, vol. 32, p. 819-821, doi: 10.1038/nbt.2925, published online Jun. 1, 2014) modified the sequences of two genes, orc1 and kelch13, which have putative roles in gene silencing and emerging resistance to artemisinin, respectively. Parasites that were altered at the appropriate sites were recovered with very high efficiency, despite there being no direct selection for the modification, indicating that neutral or even deleterious mutations can be generated using this system. CRISPR-Cas9 is also used to modify the genomes of other pathogenic parasites, including Toxoplasma gondii (see Shen et al., “Efficient gene disruption in diverse strains of Toxoplasma gondii using CRISPR/CAS9,” mBio vol. 5:e01114-14, 2014; and Sidik et al., “Efficient Genome Engineering of Toxoplasma gondii Using CRISPR/Cas9,” PLoS One vol. 9, e100450, doi: 10.1371/journal.pone.0100450, published online Jun. 27, 2014).

[1322] Vyas et al. (“A Candida albicans CRISPR system permits genetic engineering of essential genes and gene families,” Science Advances, vol. 1, e1500248, DOI: 10.1126/sciadv.1500248, Apr. 3, 2015) employed a CRISPR system to overcome long-standing obstacles to genetic engineering in C. albicans and efficiently mutate in a single experiment both copies of several different genes. In an organism where several mechanisms contribute to drug resistance, Vyas produced homozygous double mutants that no longer displayed the hyper-resistance to fluconazole or cycloheximide displayed by the parental clinical isolate Can90. Vyas also obtained homozygous loss-of-function mutations in essential genes of C. albicans by creating conditional alleles. Null alleles of DCR1, which is required for ribosomal RNA processing, are lethal at low temperature but viable at high temperature. Vyas used a repair template that introduced a nonsense mutation and isolated dcr1/dcr1 mutants that failed to grow at 16° C.

Treating Diseases with Genetic or Epigenetic Aspects

[1323] The CRISPR-Cas systems of the present invention can be used to correct genetic mutations that were previously attempted with limited success using TALEN and ZFN and have been identified as potential targets for Cas9 systems, including as in published applications of Editas Medicine describing methods to use Cas9 systems to target loci to therapeutically address diseases with gene therapy, including, WO 2015/048577 CRISPR-RELATED METHODS AND COMPOSITIONS of Gluckmann et al.; WO 2015/070083 CRISPR-RELATED METHODS AND COMPOSITIONS WITH GOVERNING gRNAS of Glucksmann et al.; In some embodiments, the treatment, prophylaxis or diagnosis of Primary Open Angle Glaucoma (POAG) is provided. The target is preferably the MYOC gene. This is described in WO2015153780, the disclosure of which is hereby incorporated by reference.

[1324] Mention is made of WO2015/134812 CRISPR/CAS-RELATED METHODS AND COMPOSITIONS FOR TREATING USHER SYNDROME AND RETINITIS PIGMENTOSA of Maeder et al. Through the teachings herein the invention comprehends methods and materials of these documents applied in conjunction with the teachings herein. In an aspect of ocular and auditory gene therapy, methods and compositions for treating Usher Syndrome and Retinis-Pigmentosa may be adapted to the CRISPR-Cas system of the present invention (see, e.g., WO 2015/134812). In an embodiment, the WO 2015/134812 involves a treatment or delaying the onset or progression of Usher Syndrome type IIA (USH2A, USH11A) and retinitis pigmentosa 39 (RP39) by gene editing, e.g., using CRISPR-Cas9 mediated methods to correct the guanine deletion at position 2299 in the USH2A gene (e.g., replace the deleted guanine residue at position 2299 in the USH2A gene). A similar effect can be achieved with Cpf1. In a related aspect, a mutation is targeted by cleaving with either one or more nuclease, one or more nickase, or a combination thereof, e.g., to induce HDR with a donor template that corrects the point mutation (e.g., the single nucleotide, e.g., guanine, deletion). The alteration or correction of the mutant USH2A gene can be mediated by any mechanism. Exemplary mechanisms that can be associated with the alteration (e.g., correction) of the mutant HSH2A gene include, but are not limited to, non-homologous end joining, microhomology-mediated end joining (MMEJ), homology-directed repair (e.g., endogenous donor template mediated), SDSA (synthesis dependent strand annealing), single-strand annealing or single strand invasion. In an embodiment, the method used for treating Usher Syndrome and Retinis-Pigmentosa can include acquiring knowledge of the mutation carried by the subject, e.g., by sequencing the appropriate portion of the USH2A gene.

[1325] Mention is also made of WO 2015/138510 and through the teachings herein the invention (using a CRISPR-Cas9 system) comprehends providing a treatment or delaying the onset or progression of Leber's Congenital Amaurosis 10 (LCA 10). LCA 10 is caused by a mutation in the CEP290 gene, e.g., a c.2991+1655, adenine to guanine mutation in the CEP290 gene which gives rise to a cryptic splice site in intron 26. This is a mutation at nucleotide 1655 of intron 26 of CEP290, e.g., an A to G mutation. CEP290 is also known as: CT87; MKS4; POC3; rd16; BBS14; JBTS5; LCAJO; NPHP6; SLSN6; and 3H11Ag (see, e.g., WO 2015/138510). In an aspect of gene therapy, the invention involves introducing one or more breaks near the site of the LCA target position (e.g., c.2991+1655; A to G) in at least one allele of the CEP290 gene. Altering the LCA10 target position refers to (1) break-induced introduction of an indel (also referred to herein as NHEJ-mediated introduction of an indel) in close proximity to or including a LCA10 target position (e.g., c.2991+1655A to G), or (2) break-induced deletion (also referred to herein as NHEJ-mediated deletion) of genomic sequence including the mutation at a LCA10 target position (e.g., c.2991+1655A to G). Both approaches give rise to the loss or destruction of the cryptic splice site resulting from the mutation at the LCA 10 target position.

[1326] Researchers are contemplating whether gene therapies could be employed to treat a wide range of diseases. The CRISPR systems of the present invention based on Cpf1 effector protein are envisioned for such therapeutic uses, including, but noted limited to further exemplified targeted areas and with delivery methods as below. Some examples of conditions or diseases that might be usefully treated using the present system are included in the examples of genes and references included herein and are currently associated with those conditions are also provided there. The genes and conditions exemplified are not exhaustive.

### Treating Diseases of the Circulatory System

[1327] The present invention also contemplates delivering the CRISPR-Cas system, specifically the novel CRISPR effector protein systems described herein, to the blood or hematopoetic stem cells. The plasma exosomes of Wahlgren et al. (Nucleic Acids Research, 2012, Vol. 40, No. 17 e130) were previously described and may be utilized to deliver the CRISPR Cas system to the blood. The nucleic acid-targeting system of the present invention is also contemplated to treat hemoglobinopathies, such as thalassemias and sickle cell disease. See, e.g., International Patent Publication No. WO 2013/126794 for potential targets that may be targeted by the CRISPR Cas system of the present invention.

[1328] Drakopoulou, “Review Article, The Ongoing Challenge of Hematopoietic Stem Cell-Based Gene Therapy for β-Thalassemia,” Stem Cells International, Volume 2011, Article ID 987980, 10 pages, doi:10.4061/2011/987980, incorporated herein by reference along with the documents it cites, as if set out in full, discuss modifying HSCs using a lentivirus that delivers a gene for β-globin or γ-globin. In contrast to using lentivirus, with the knowledge in the art and the teachings in this disclosure, the skilled person can correct HSCs as to β-Thalassemia using a CRISPR-Cas system that targets and corrects the mutation (e.g., with a suitable HDR template that delivers a coding sequence for β-globin or γ-globin, advantageously non-sickling β-globin or γ-globin); specifically, the guide RNA can target mutation that give rise to β-Thalassemia, and the HDR can provide coding for proper expression of β-globin or γ-globin. An guide RNA that targets the mutation-and-Cas protein containing particle is contacted with HSCs carrying the mutation. The particle also can contain a suitable HDR template to correct the mutation for proper expression of β-globin or γ-globin; or the HSC can be contacted with a second particle or a vector that contains or delivers the HDR template. The so contacted cells can be administered; and optionally treated/expanded; cf. Cartier. In this regard mention is made of: Cavazzana, “Outcomes of Gene Therapy for β-Thalassemia Major via Transplantation of Autologous Hematopoietic Stem Cells Transduced Ex Vivo with a Lentiviral β^{A-T87Q}-Globin Vector.” tif2014.org/abstractFiles/Jean %20Antoine%20Ribeil_Abstract.pdf; Cavazzana-Calvo, “Transfusion independence and HMGA2 activation after gene therapy of human β-thalassaemia”, Nature 467, 318-322 (16 Sep. 2010) doi:10.1038/nature09328; Nienhuis, “Development of Gene Therapy for Thalassemia, Cold Spring Harbor Perspectives in Medicine, doi: 10.1101/cshperspect.a011833 (2012), LentiGlobin BB305, a lentiviral vector containing an engineered β-globin gene (βA-T87Q); and Xie et al., “Seamless gene correction of β-thalassaemia mutations in patient-specific iPSCs using CRISPR/Cas9 and piggyback” Genome Research gr.173427.114 (2014) http://www.genome.org/cgi/doi/10.1101/gr.17374271444 (Cold Spring Harbor Laboratory Press); that is the subject of Cavazzana work involving human β-thalassaemia and the subject of the Xie work, are all incorporated herein by reference, together with all documents cited therein or associated therewith. In the instant invention, the HDR template can provide for the HSC to express an engineered β-globin gene (e.g., βA-T87Q), or β-globin as in Xie.

[1329] Xu et al. (Sci Rep. 2015 Jul. 9; 5:12065. doi: 10.1038/srep12065) have designed TALENs and CRISPR-Cas9 to directly target the intron2 mutation site IVS2-654 in the globin gene. Xu et al. observed different frequencies of double-strand breaks (DSBs) at IVS2-654 loci using TALENs and CRISPR-Cas9, and TALENs mediated a higher homologous gene targeting efficiency compared to CRISPR-Cas9 when combined with the piggyBac transposon donor. In addition, more obvious off-target events were observed for CRISPR-Cas9 compared to TALENs. Finally, TALENs-corrected iPSC clones were selected for erythroblast differentiation using the OP9 co-culture system and detected relatively higher transcription of HBB than the uncorrected cells.

[1330] Song et al. (Stem Cells Dev. 2015 May 1; 24(9): 1053-65. doi: 10.1089/scd.2014.0347. Epub 2015 Feb. 5) used CRISPR/Cas9 to correct β-Thal iPSCs; gene-corrected cells exhibit normal karyotypes and full pluripotency as human embryonic stem cells (hESCs) showed no off-targeting effects. Then, Song et al. evaluated the differentiation efficiency of the gene-corrected β-Thal iPSCs. Song et al. found that during hematopoietic differentiation, gene-corrected β-Thal iPSCs showed an increased embryoid body ratio and various hematopoietic progenitor cell percentages. More importantly, the gene-corrected β-Thal iPSC lines restored HBB expression and reduced reactive oxygen species production compared with the uncorrected group. Song et al.'s study suggested that hematopoietic differentiation efficiency of β-Thal iPSCs was greatly improved once corrected by the CRISPR-Cas9 system. Similar methods may be performed utilizing the CRISPR-Cas systems described herein, e.g. systems comprising Cpf1 effector proteins.

[1331] Sickle cell anemia is an autosomal recessive genetic disease in which red blood cells become sickle-shaped. It is caused by a single base substitution in the β-globin gene, which is located on the short arm of chromosome 11. As a result, valine is produced instead of glutamic acid causing the production of sickle hemoglobin (HbS). This results in the formation of a distorted shape of the erythrocytes. Due to this abnormal shape, small blood vessels can be blocked, causing serious damage to the bone, spleen and skin tissues. This may lead to episodes of pain, frequent infections, hand-foot syndrome or even multiple organ failure. The distorted erythrocytes are also more susceptible to hemolysis, which leads to serious anemia. As in the case of β-thalassaemia, sickle cell anemia can be corrected by modifying HSCs with the CRISPR-Cas system. The system allows the specific editing of the cell's genome by cutting its DNA and then letting it repair itself. The Cas protein is inserted and directed by a RNA guide to the mutated point and then it cuts the DNA at that point. Simultaneously, a healthy version of the sequence is inserted. This sequence is used by the cell's own repair system to fix the induced cut. In this way, the CRISPR-Cas allows the correction of the mutation in the previously obtained stem cells. With the knowledge in the art and the teachings in this disclosure, the skilled person can correct HSCs as to sickle cell anemia using a CRISPR-Cas system that targets and corrects the mutation (e.g., with a suitable HDR template that delivers a coding sequence for β-globin, advantageously non-sickling β-globin); specifically, the guide RNA can target mutation that give rise to sickle cell anemia, and the HDR can provide coding for proper expression of β-globin. An guide RNA that targets the mutation-and-Cas protein containing particle is contacted with HSCs carrying the mutation. The particle also can contain a suitable HDR template to correct the mutation for proper expression of β-globin; or the HSC can be contacted with a second particle or a vector that contains or delivers the HDR template. The so contacted cells can be administered; and optionally treated/expanded; cf. Cartier. The HDR template can provide for the HSC to express an engineered β-globin gene (e.g., βA-T87Q), or β-globin as in Xie.

[1332] Williams, “Broadening the Indications for Hematopoietic Stem Cell Genetic Therapies,” Cell Stem Cell 13:263-264 (2013), incorporated herein by reference along with the documents it cites, as if set out in full, report lentivirus-mediated gene transfer into HSC/P cells from patients with the lysosomal storage disease metachromatic leukodystrophy disease (MLD), a genetic disease caused by deficiency of arylsulfatase A (ARSA), resulting in nerve demyelination; and lentivirus-mediated gene transfer into HSCs of patients with Wiskott-Aldrich syndrome (WAS) (patients with defective WAS protein, an effector of the small GTPase CDC42 that regulates cytoskeletal function in blood cell lineages and thus suffer from immune deficiency with recurrent infections, autoimmune symptoms, and thrombocytopenia with abnormally small and dysfunctional platelets leading to excessive bleeding and an increased risk of leukemia and lymphoma). In contrast to using lentivirus, with the knowledge in the art and the teachings in this disclosure, the skilled person can correct HSCs as to MLD (deficiency of arylsulfatase A (ARSA)) using a CRISPR-Cas system that targets and corrects the mutation (deficiency of arylsulfatase A (ARSA)) (e.g., with a suitable HDR template that delivers a coding sequence for ARSA); specifically, the guide RNA can target mutation that gives rise to MLD (deficient ARSA), and the HDR can provide coding for proper expression of ARSA. An guide RNA that targets the mutation-and-Cas protein containing particle is contacted with HSCs carrying the mutation. The particle also can contain a suitable HDR template to correct the mutation for proper expression of ARSA; or the HSC can be contacted with a second particle or a vector that contains or delivers the HDR template. The so contacted cells can be administered; and optionally treated/expanded; cf. Cartier. In contrast to using lentivirus, with the knowledge in the art and the teachings in this disclosure, the skilled person can correct HSCs as to WAS using a CRISPR-Cas system that targets and corrects the mutation (deficiency of WAS protein) (e.g., with a suitable HDR template that delivers a coding sequence for WAS protein); specifically, the guide RNA can target mutation that gives rise to WAS (deficient WAS protein), and the HDR can provide coding for proper expression of WAS protein. An guide RNA that targets the mutation-and-Cpf1 protein containing particle is contacted with HSCs carrying the mutation. The particle also can contain a suitable HDR template to correct the mutation for proper expression of WAS protein; or the HSC can be contacted with a second particle or a vector that contains or delivers the HDR template. The so contacted cells can be administered; and optionally treated/expanded; cf. Cartier.

[1333] Watts, “Hematopoietic Stem Cell Expansion and Gene Therapy” Cytotherapy 13(10):1164-1171. doi:10.3109/14653249.2011.620748 (2011), incorporated herein by reference along with the documents it cites, as if set out in full, discusses hematopoietic stem cell (HSC) gene therapy, e.g., virus-mediated HSC gene therapy, as an highly attractive treatment option for many disorders including hematologic conditions, immunodeficiencies including HIV/AIDS, and other genetic disorders like lysosomal storage diseases, including SCID-X1, ADA-SCID, β-thalassemia, X-linked CGD, Wiskott-Aldrich syndrome, Fanconi anemia, adrenoleukodystrophy (ALD), and metachromatic leukodystrophy (MLD).

[1334] US Patent Publication Nos. 20110225664, 20110091441, 20100229252, 20090271881 and 20090222937 assigned to Cellectis, relates to CREI variants, wherein at least one of the two I-CreI monomers has at least two substitutions, one in each of the two functional subdomains of the LAGLIDADG (SEQ ID NO: 26) core domain situated respectively from positions 26 to 40 and 44 to 77 of I-CreI, said variant being able to cleave a DNA target sequence from the human interleukin-2 receptor gamma chain (IL2RG) gene also named common cytokine receptor gamma chain gene or gamma C gene. The target sequences identified in US Patent Publication Nos. 20110225664, 20110091441, 20100229252, 20090271881 and 20090222937 may be utilized for the nucleic acid-targeting system of the present invention.

[1335] Severe Combined Immune Deficiency (SCID) results from a defect in lymphocytes T maturation, always associated with a functional defect in lymphocytes B (Cavazzana-Calvo et al., Annu. Rev. Med., 2005, 56, 585-602; Fischer et al., Immunol. Rev., 2005, 203, 98-109). Overall incidence is estimated to 1 in 75 000 births. Patients with untreated SCID are subject to multiple opportunist micro-organism infections, and do generally not live beyond one year. SCID can be treated by allogenic hematopoietic stem cell transfer, from a familial donor. Histocompatibility with the donor can vary widely. In the case of Adenosine Deaminase (ADA) deficiency, one of the SCID forms, patients can be treated by injection of recombinant Adenosine Deaminase enzyme.

[1336] Since the ADA gene has been shown to be mutated in SCID patients (Giblett et al., Lancet, 1972, 2, 1067-1069), several other genes involved in SCID have been identified (Cavazzana-Calvo et al., Annu. Rev. Med 2005, 56, 585-602; Fischer et al., Immunol. Rev., 2005, 203, 98-109). There are four major causes for SCID: (i) the most frequent form of SCID, SCID-X1 (X-linked SCID or X-SCID), is caused by mutation in the IL2RG gene, resulting in the absence of mature T lymphocytes and NK cells. IL2RG encodes the gamma C protein (Noguchi, et al., Cell, 1993, 73, 147-157), a common component of at least five interleukin receptor complexes. These receptors activate several targets through the JAK3 kinase (Macchi et al., Nature, 1995, 377, 65-68), which inactivation results in the same syndrome as gamma C inactivation; (ii) mutation in the ADA gene results in a defect in purine metabolism that is lethal for lymphocyte precursors, which in turn results in the quasi absence of B, T and NK cells; (iii) V(D)J recombination is an essential step in the maturation of immunoglobulins and T lymphocytes receptors (TCRs). Mutations in Recombination Activating Gene 1 and 2 (RAG1 and RAG2) and Artemis, three genes involved in this process, result in the absence of mature T and B lymphocytes; and (iv) Mutations in other genes such as CD45, involved in T cell specific signaling have also been reported, although they represent a minority of cases (Cavazzana-Calvo et al., Annu. Rev. Med., 2005, 56, 585-602; Fischer et al., Immunol. Rev., 2005, 203, 98-109). Since when their genetic bases have been identified, the different SCID forms have become a paradigm for gene therapy approaches (Fischer et al., Immunol. Rev., 2005, 203, 98-109) for two major reasons. First, as in all blood diseases, an ex vivo treatment can be envisioned. Hematopoietic Stem Cells (HSCs) can be recovered from bone marrow, and keep their pluripotent properties for a few cell divisions. Therefore, they can be treated in vitro, and then reinjected into the patient, where they repopulate the bone marrow. Second, since the maturation of lymphocytes is impaired in SCID patients, corrected cells have a selective advantage. Therefore, a small number of corrected cells can restore a functional immune system. This hypothesis was validated several times by (i) the partial restoration of immune functions associated with the reversion of mutations in SCID patients (Hirschhorn et al., Nat. Genet., 1996, 13, 290-295; Stephan et al., N. Engl. J. Med., 1996, 335, 1563-1567; Bousso et al., Proc. Natl., Acad. Sci. USA, 2000, 97, 274-278; Wada et al., Proc. Natl. Acad. Sci. USA, 2001, 98, 8697-8702; Nishikomori et al., Blood, 2004, 103, 4565-4572), (ii) the correction of SCID-X1 deficiencies in vitro in hematopoietic cells (Candotti et al., Blood, 1996, 87, 3097-3102; Cavazzana-Calvo et al., Blood, 1996, Blood, 88, 3901-3909; Taylor et al., Blood, 1996, 87, 3103-3107; Hacein-Bey et al., Blood, 1998, 92, 4090-4097), (iii) the correction of SCID-X1 (Soudais et al., Blood, 2000, 95, 3071-3077; Tsai et al., Blood, 2002, 100, 72-79), JAK-3 (Bunting et al., Nat. Med., 1998, 4, 58-64; Bunting et al., Hum. Gene Ther., 2000, 11, 2353-2364) and RAG2 (Yates et al., Blood, 2002, 100, 3942-3949) deficiencies in vivo in animal models and (iv) by the result of gene therapy clinical trials (Cavazzana-Calvo et al., Science, 2000, 288, 669-672; Aiuti et al., Nat. Med., 2002; 8, 423-425; Gaspar et al., Lancet, 2004, 364, 2181-2187).

[1337] US Patent Publication No. 20110182867 assigned to the Children's Medical Center Corporation and the President and Fellows of Harvard College relates to methods and uses of modulating fetal hemoglobin expression (HbF) in a hematopoietic progenitor cells via inhibitors of BCL11A expression or activity, such as RNAi and antibodies. The targets disclosed in US Patent Publication No. 20110182867, such as BCL11A, may be targeted by the CRISPR Cas system of the present invention for modulating fetal hemoglobin expression. See also Bauer et al. (Science 11 Oct. 2013: Vol. 342 no. 6155 pp. 253-257) and Xu et al. (Science 18 Nov. 2011: Vol. 334 no. 6058 pp. 993-996) for additional BCL11A targets.

[1338] With the knowledge in the art and the teachings in this disclosure, the skilled person can correct HSCs as to a genetic hematologic disorder, e.g., β-Thalassemia, Hemophilia, or a genetic lysosomal storage disease.

### HSC—Delivery to and Editing of Hematopoetic Stem Cells; and Particular Conditions.

[1339] The term “Hematopoetic Stem Cell” or “HSC” is meant to include broadly those cells considered to be an HSC, e.g., blood cells that give rise to all the other blood cells and are derived from mesoderm; located in the red bone marrow, which is contained in the core of most bones. HSCs of the invention include cells having a phenotype of hematopoeitic stem cells, identified by small size, lack of lineage (lin) markers, and markers that belong to the cluster of differentiation series, like: CD34, CD38, CD90, CD133, CD105, CD45, and also c-kit,—the receptor for stem cell factor. Hematopoietic stem cells are negative for the markers that are used for detection of lineage commitment, and are, thus, called Lin-; and, during their purification by FACS, a number of up to 14 different mature blood-lineage markers, e.g., CD13 & CD33 for myeloid, CD71 for erythroid, CD19 for B cells, CD61 for megakaryocytic, etc. for humans; and, B220 (murine CD45) for B cells, Mac-1 (CD11b/CD18) for monocytes, Gr-1 for Granulocytes, Ter119 for erythroid cells, Il7Ra, CD3, CD4, CD5, CD8 for T cells, etc. Mouse HSC markers: CD34lo/−, SCA-1+, Thy1.1+/lo, CD38+, C-kit+, lin−, and Human HSC markers: CD34+, CD59+, Thy1/CD90+, CD38lo/−, C-kit/CD117+, and lin−. HSCs are identified by markers. Hence in embodiments discussed herein, the HSCs can be CD34+ cells. HSCs can also be hematopoietic stem cells that are CD34−/CD38−. Stem cells that may lack c-kit on the cell surface that are considered in the art as HSCs are within the ambit of the invention, as well as CD133+ cells likewise considered HSCs in the art.

[1340] The CRISPR-Cas (eg Cpf1) system may be engineered to target genetic locus or loci in HSCs. Cas (eg Cpf1) protein, advantageously codon-optimized for a eukaryotic cell and especially a mammalian cell, e.g., a human cell, for instance, HSC, and sgRNA targeting a locus or loci in HSC, e.g., the gene EMX1, may be prepared. These may be delivered via particles. The particles may be formed by the Cas (eg Cpf1) protein and the gRNA being admixed. The gRNA and Cas (eg Cpf1) protein mixture may for example be admixed with a mixture comprising or consisting essentially of or consisting of surfactant, phospholipid, biodegradable polymer, lipoprotein and alcohol, whereby particles containing the gRNA and Cas (eg Cpf1) protein may be formed. The invention comprehends so making particles and particles from such a method as well as uses thereof.

[1341] More generally, particles may be formed using an efficient process. First, Cas (eg Cpf1) protein and gRNA targeting the gene EMX1 or the control gene LacZ may be mixed together at a suitable, e.g., 3:1 to 1:3 or 2:1 to 1:2 or 1:1 molar ratio, at a suitable temperature, e.g., 15-30 C, e.g., 20-25 C, e.g., room temperature, for a suitable time, e.g., 15-45, such as 30 minutes, advantageously in sterile, nuclease free buffer, e.g., 1×PBS. Separately, particle components such as or comprising: a surfactant, e.g., cationic lipid, e.g., 1,2-dioleoyl-3-trimethylammonium-propane (DOTAP); phospholipid, e.g., dimyristoylphosphatidylcholine (DMPC); biodegradable polymer, such as an ethylene-glycol polymer or PEG, and a lipoprotein, such as a low-density lipoprotein, e.g., cholesterol may be dissolved in an alcohol, advantageously a C1-6 alkyl alcohol, such as methanol, ethanol, isopropanol, e.g., 100% ethanol. The two solutions may be mixed together to form particles containing the Cas (eg Cpf1)-gRNA complexes. In certain embodiments the particle can contain an HDR template. That can be a particle co-administered with gRNA+Cas (eg Cpf1) protein-containing particle, or i.e., in addition to contacting an HSC with an gRNA+Cas (eg Cpf1) protein-containing particle, the HSC is contacted with a particle containing an HDR template; or the HSC is contacted with a particle containing all of the gRNA, Cas (eg Cpf1) and the HDR template. The HDR template can be administered by a separate vector, whereby in a first instance the particle penetrates an HSC cell and the separate vector also penetrates the cell, wherein the HSC genome is modified by the gRNA+Cas (eg Cpf1) and the HDR template is also present, whereby a genomic loci is modified by the HDR; for instance, this may result in correcting a mutation.

[1342] After the particles form, HSCs in 96 well plates may be transfected with 15 ug Cas (eg Cpf1) protein per well. Three days after transfection, HSCs may be harvested, and the number of insertions and deletions (indels) at the EMX1 locus may be quantified.

[1343] This illustrates how HSCs can be modified using CRISPR-Cas (eg Cpf1) targeting a genomic locus or loci of interest in the HSC. The HSCs that are to be modified can be in vivo, i.e., in an organism, for example a human or a non-human eukaryote, e.g., animal, such as fish, e.g., zebra fish, mammal, e.g., primate, e.g., ape, chimpanzee, macaque, rodent, e.g., mouse, rabbit, rat, canine or dog, livestock (cow/bovine, sheep/ovine, goat or pig), fowl or poultry, e.g., chicken. The HSCs that are to be modified can be in vitro, i.e., outside of such an organism. And, modified HSCs can be used ex vivo, i.e., one or more HSCs of such an organism can be obtained or isolated from the organism, optionally the HSC(s) can be expanded, the HSC(s) are modified by a composition comprising a CRISPR-Cas (eg Cpf1) that targets a genetic locus or loci in the HSC, e.g., by contacting the HSC(s) with the composition, for instance, wherein the composition comprises a particle containing the CRISPR enzyme and one or more gRNA that targets the genetic locus or loci in the HSC, such as a particle obtained or obtainable from admixing an gRNA and Cas (eg Cpf1) protein mixture with a mixture comprising or consisting essentially of or consisting of surfactant, phospholipid, biodegradable polymer, lipoprotein and alcohol (wherein one or more gRNA targets the genetic locus or loci in the HSC), optionally expanding the resultant modified HSCs and administering to the organism the resultant modified HSCs. In some instances the isolated or obtained HSCs can be from a first organism, such as an organism from a same species as a second organism, and the second organism can be the organism to which the resultant modified HSCs are administered, e.g., the first organism can be a donor (such as a relative as in a parent or sibling) to the second organism. Modified HSCs can have genetic modifications to address or alleviate or reduce symptoms of a disease or condition state of an individual or subject or patient. Modified HSCs, e.g., in the instance of a first organism donor to a second organism, can have genetic modifications to have the HSCs have one or more proteins e.g. surface markers or proteins more like that of the second organism. Modified HSCs can have genetic modifications to simulate a disease or condition state of an individual or subject or patient and would be re-administered to a non-human organism so as to prepare an animal model. Expansion of HSCs is within the ambit of the skilled person from this disclosure and knowledge in the art, see e.g., Lee, “Improved ex vivo expansion of adult hematopoietic stem cells by overcoming CUL4-mediated degradation of HOXB4.” Blood. 2013 May 16; 121(20): 4082-9. doi: 10.1182/blood-2012-09-455204. Epub 2013 Mar. 21.

[1344] As indicated to improve activity, gRNA may be pre-complexed with the Cas (eg Cpf1) protein, before formulating the entire complex in a particle. Formulations may be made with a different molar ratio of different components known to promote delivery of nucleic acids into cells (e.g. 1,2-dioleoyl-3-trimethylammonium-propane (DOTAP), 1,2-ditetradecanoyl-sn-glycero-3-phosphocholine (DMPC), polyethylene glycol (PEG), and cholesterol) For example DOTAP:DMPC:PEG:Cholesterol Molar Ratios may be DOTAP 100, DMPC 0, PEG 0, Cholesterol 0; or DOTAP 90, DMPC 0, PEG 10, Cholesterol 0; or DOTAP 90, DMPC 0, PEG 5, Cholesterol 5. DOTAP 100, DMPC 0, PEG 0, Cholesterol 0. The invention accordingly comprehends admixing gRNA, Cas (eg Cpf1) protein and components that form a particle; as well as particles from such admixing.

[1345] In a preferred embodiment, particles containing the Cas (eg Cpf1)-gRNA complexes may be formed by mixing Cas (eg Cpf1) protein and one or more gRNAs together, preferably at a 1:1 molar ratio, enzyme: guide RNA. Separately, the different components known to promote delivery of nucleic acids (e.g. DOTAP, DMPC, PEG, and cholesterol) are dissolved, preferably in ethanol. The two solutions are mixed together to form particles containing the Cas (eg Cpf1)-gRNA complexes. After the particles are formed, Cas (eg Cpf1)-gRNA complexes may be transfected into cells (e.g. HSCs). Bar coding may be applied. The particles, the Cas-9 and/or the gRNA may be barcoded.

[1346] The invention in an embodiment comprehends a method of preparing an gRNA-and-Cas (eg Cpf1) protein containing particle comprising admixing an gRNA and Cas (eg Cpf1) protein mixture with a mixture comprising or consisting essentially of or consisting of surfactant, phospholipid, biodegradable polymer, lipoprotein and alcohol. An embodiment comprehends an gRNA-and-Cas (eg Cpf1) protein containing particle from the method. The invention in an embodiment comprehends use of the particle in a method of modifying a genomic locus of interest, or an organism or a non-human organism by manipulation of a target sequence in a genomic locus of interest, comprising contacting a cell containing the genomic locus of interest with the particle wherein the gRNA targets the genomic locus of interest; or a method of modifying a genomic locus of interest, or an organism or a non-human organism by manipulation of a target sequence in a genomic locus of interest, comprising contacting a cell containing the genomic locus of interest with the particle wherein the gRNA targets the genomic locus of interest. In these embodiments, the genomic locus of interest is advantageously a genomic locus in an HSC.

[1347] Considerations for Therapeutic Applications: A consideration in genome editing therapy is the choice of sequence-specific nuclease, such as a variant of a Cpf1 nuclease. Each nuclease variant may possess its own unique set of strengths and weaknesses, many of which must be balanced in the context of treatment to maximize therapeutic benefit. Thus far, two therapeutic editing approaches with nucleases have shown significant promise: gene disruption and gene correction. Gene disruption involves stimulation of NHEJ to create targeted indels in genetic elements, often resulting in loss of function mutations that are beneficial to patients. In contrast, gene correction uses HDR to directly reverse a disease causing mutation, restoring function while preserving physiological regulation of the corrected element. HDR may also be used to insert a therapeutic transgene into a defined ‘safe harbor’ locus in the genome to recover missing gene function. For a specific editing therapy to be efficacious, a sufficiently high level of modification must be achieved in target cell populations to reverse disease symptoms. This therapeutic modification ‘threshold’ is determined by the fitness of edited cells following treatment and the amount of gene product necessary to reverse symptoms. With regard to fitness, editing creates three potential outcomes for treated cells relative to their unedited counterparts: increased, neutral, or decreased fitness. In the case of increased fitness, for example in the treatment of SCID-X1, modified hematopoietic progenitor cells selectively expand relative to their unedited counterparts. SCID-X1 is a disease caused by mutations in the IL2RG gene, the function of which is required for proper development of the hematopoietic lymphocyte lineage [Leonard, W. J., et al. Immunological reviews 138, 61-86 (1994); Kaushansky, K. & Williams, W. J. Williams hematology, (McGraw-Hill Medical, New York, 2010)]. In clinical trials with patients who received viral gene therapy for SCID-X1, and a rare example of a spontaneous correction of SCID-X1 mutation, corrected hematopoietic progenitor cells may be able to overcome this developmental block and expand relative to their diseased counterparts to mediate therapy [Bousso, P., et al. Proceedings of the National Academy of Sciences of the United States of America 97, 274-278 (2000); Hacein-Bey-Abina, S., et al. The New England journal of medicine 346, 1185-1193 (2002); Gaspar, H. B., et al. Lancet 364, 2181-2187 (2004)]. In this case, where edited cells possess a selective advantage, even low numbers of edited cells can be amplified through expansion, providing a therapeutic benefit to the patient. In contrast, editing for other hematopoietic diseases, like chronic granulomatous disorder (CGD), would induce no change in fitness for edited hematopoietic progenitor cells, increasing the therapeutic modification threshold. CGD is caused by mutations in genes encoding phagocytic oxidase proteins, which are normally used by neutrophils to generate reactive oxygen species that kill pathogens [Mukherjee, S. & Thrasher, A. J. Gene 525, 174-181 (2013)]. As dysfunction of these genes does not influence hematopoietic progenitor cell fitness or development, but only the ability of a mature hematopoietic cell type to fight infections, there would be likely no preferential expansion of edited cells in this disease. Indeed, no selective advantage for gene corrected cells in CGD has been observed in gene therapy trials, leading to difficulties with long-term cell engraftment [Malech, H. L., et al. Proceedings of the National Academy of Sciences of the United States of America 94, 12133-12138 (1997); Kang, H. J., et al. Molecular therapy: the journal of the American Society of Gene Therapy 19, 2092-2101 (2011)]. As such, significantly higher levels of editing would be required to treat diseases like CGD, where editing creates a neutral fitness advantage, relative to diseases where editing creates increased fitness for target cells. If editing imposes a fitness disadvantage, as would be the case for restoring function to a tumor suppressor gene in cancer cells, modified cells would be outcompeted by their diseased counterparts, causing the benefit of treatment to be low relative to editing rates. This latter class of diseases would be particularly difficult to treat with genome editing therapy.

[1348] In addition to cell fitness, the amount of gene product necessary to treat disease also influences the minimal level of therapeutic genome editing that must be achieved to reverse symptoms. Haemophilia B is one disease where a small change in gene product levels can result in significant changes in clinical outcomes. This disease is caused by mutations in the gene encoding factor IX, a protein normally secreted by the liver into the blood, where it functions as a component of the clotting cascade. Clinical severity of haemophilia B is related to the amount of factor IX activity. Whereas severe disease is associated with less than 1% of normal activity, milder forms of the diseases are associated with greater than 1% of factor IX activity [Kaushansky, K. & Williams, W. J. Williams hematology, (McGraw-Hill Medical, New York, 2010); Lofqvist, T., et al. Journal of internal medicine 241, 395-400 (1997)]. This suggests that editing therapies that can restore factor IX expression to even a small percentage of liver cells could have a large impact on clinical outcomes. A study using ZFNs to correct a mouse model of haemophilia B shortly after birth demonstrated that 3-7% correction was sufficient to reverse disease symptoms, providing preclinical evidence for this hypothesis [Li, H., et al. Nature 475, 217-221 (2011)].

[1349] Disorders where a small change in gene product levels can influence clinical outcomes and diseases where there is a fitness advantage for edited cells, are ideal targets for genome editing therapy, as the therapeutic modification threshold is low enough to permit a high chance of success given the current technology. Targeting these diseases has now resulted in successes with editing therapy at the preclinical level and a phase I clinical trial. Improvements in DSB repair pathway manipulation and nuclease delivery are needed to extend these promising results to diseases with a neutral fitness advantage for edited cells, or where larger amounts of gene product are needed for treatment. The Table below shows some examples of applications of genome editing to therapeutic models, and the references of the below Table and the documents cited in those references are hereby incorporated herein by reference as if set out in full.

| | Nuclease | | |
|---|---|---|---|
| | Platform | Therapeutic | |
| Disease Type | Employed | Strategy | References |
| Hemophilia B | ZFN | HDR-mediated | Li, H., et al. |
| | | insertion | Nature 475, |
| | | of correct | 217-221 (2011) |
| | | gene sequence | |
| SCID | ZFN | HDR-mediated | Genovese, P., |
| | | insertion | et al. |
| | | of correct | Nature 510, |
| | | gene sequence | 235-240 (2014) |
| Hereditary | CRISPR | HDR-mediated | Yin, H., |
| tyrosinemia | | correction | et al. Nature |
| | | of mutation | biotechnology 32, |
| | | in liver | 551-553 (2014) |

[1350] Addressing each of the conditions of the foregoing table, using the CRISPR-Cas (eg Cpf1) system to target by either HDR-mediated correction of mutation, or HDR-mediated insertion of correct gene sequence, advantageously via a delivery system as herein, e.g., a particle delivery system, is within the ambit of the skilled person from this disclosure and the knowledge in the art. Thus, an embodiment comprehends contacting a Hemophilia B, SCID (e.g., SCID-X1, ADA-SCID) or Hereditary tyrosinemia mutation-carrying HSC with an gRNA-and-Cas (eg Cpf1) protein containing particle targeting a genomic locus of interest as to Hemophilia B, SCID (e.g., SCID-X1, ADA-SCID) or Hereditary tyrosinemia (e.g., as in Li, Genovese or Yin). The particle also can contain a suitable HDR template to correct the mutation; or the HSC can be contacted with a second particle or a vector that contains or delivers the HDR template. In this regard, it is mentioned that Haemophilia B is an X-linked recessive disorder caused by loss-of-function mutations in the gene encoding Factor IX, a crucial component of the clotting cascade. Recovering Factor IX activity to above 1% of its levels in severely affected individuals can transform the disease into a significantly milder form, as infusion of recombinant Factor IX into such patients prophylactically from a young age to achieve such levels largely ameliorates clinical complications. With the knowledge in the art and the teachings in this disclosure, the skilled person can correct HSCs as to Haemophilia B using a CRISPR-Cas (eg Cpf1) system that targets and corrects the mutation (X-linked recessive disorder caused by loss-of-function mutations in the gene encoding Factor IX) (e.g., with a suitable HDR template that delivers a coding sequence for Factor IX); specifically, the gRNA can target mutation that give rise to Haemophilia B, and the HDR can provide coding for proper expression of Factor IX. An gRNA that targets the mutation-and-Cas (eg Cpf1) protein containing particle is contacted with HSCs carrying the mutation. The particle also can contain a suitable HDR template to correct the mutation for proper expression of Factor IX; or the HSC can be contacted with a second particle or a vector that contains or delivers the HDR template. The so contacted cells can be administered; and optionally treated/expanded; cf. Cartier, discussed herein.

[1351] In Cartier, “MINI-SYMPOSIUM: X-Linked Adrenoleukodystrophypa, Hematopoietic Stem Cell Transplantation and Hematopoietic Stem Cell Gene Therapy in X-Linked Adrenoleukodystrophy,” Brain Pathology 20 (2010) 857-862, incorporated herein by reference along with the documents it cites, as if set out in full, there is recognition that allogeneic hematopoietic stem cell transplantation (HSCT) was utilized to deliver normal lysosomal enzyme to the brain of a patient with Hurler's disease, and a discussion of HSC gene therapy to treat ALD. In two patients, peripheral CD34+ cells were collected after granulocyte-colony stimulating factor (G-CSF) mobilization and transduced with an myeloproliferative sarcoma virus enhancer, negative control region deleted, d1587rev primer binding site substituted (MND)-ALD lentiviral vector. CD34+ cells from the patients were transduced with the MND-ALD vector during 16 h in the presence of cytokines at low concentrations. Transduced CD34+ cells were frozen after transduction to perform on 5% of cells various safety tests that included in particular three replication-competent lentivirus (RCL) assays. Transduction efficacy of CD34+ cells ranged from 35% to 50% with a mean number of lentiviral integrated copy between 0.65 and 0.70. After the thawing of transduced CD34+ cells, the patients were reinfused with more than 4.106 transduced CD34+ cells/kg following full myeloablation with busulfan and cyclophos-phamide. The patient's HSCs were ablated to favor engraftment of the gene-corrected HSCs. Hematological recovery occurred between days 13 and 15 for the two patients. Nearly complete immunological recovery occurred at 12 months for the first patient, and at 9 months for the second patient. In contrast to using lentivirus, with the knowledge in the art and the teachings in this disclosure, the skilled person can correct HSCs as to ALD using a CRISPR-Cas (Cpf1) system that targets and corrects the mutation (e.g., with a suitable HDR template); specifically, the gRNA can target mutations in ABCD1, a gene located on the X chromosome that codes for ALD, a peroxisomal membrane transporter protein, and the HDR can provide coding for proper expression of the protein. An gRNA that targets the mutation-and-Cas (Cpf1) protein containing particle is contacted with HSCs, e.g., CD34+ cells carrying the mutation as in Cartier. The particle also can contain a suitable HDR template to correct the mutation for expression of the peroxisomal membrane transporter protein; or the HSC can be contacted with a second particle or a vector that contains or delivers the HDR template. The so contacted cells optionally can be treated as in Cartier. The so contacted cells can be administered as in Cartier.

[1352] Mention is made of WO 2015/148860, through the teachings herein the invention comprehends methods and materials of these documents applied in conjunction with the teachings herein. In an aspect of blood-related disease gene therapy, methods and compositions for treating beta thalassemia may be adapted to the CRISPR-Cas system of the present invention (see, e.g., WO 2015/148860). In an embodiment, WO 2015/148860 involves the treatment or prevention of beta thalassemia, or its symptoms, e.g., by altering the gene for B-cell CLL/lymphoma 11A (BCL11A). The BCL11A gene is also known as B-cell CLL/lymphoma 11A, BCL11A-L, BCL11A-S, BCL11AXL, CTIP 1, HBFQTL5 and ZNF. BCL11A encodes a zinc-finger protein that is involved in the regulation of globin gene expression. By altering the BCL11A gene (e.g., one or both alleles of the BCL11A gene), the levels of gamma globin can be increased. Gamma globin can replace beta globin in the hemoglobin complex and effectively carry oxygen to tissues, thereby ameliorating beta thalassemia disease phenotypes.

[1353] Mention is also made of WO 2015/148863 and through the teachings herein the invention comprehends methods and materials of these documents which may be adapted to the CRISPR-Cas system of the present invention. In an aspect of treating and preventing sickle cell disease, which is an inherited hematologic disease, WO 2015/148863 comprehends altering the BCL11A gene. By altering the BCL11A gene (e.g., one or both alleles of the BCL11A gene), the levels of gamma globin can be increased. Gamma globin can replace beta globin in the hemoglobin complex and effectively carry oxygen to tissues, thereby ameliorating sickle cell disease phenotypes.

[1354] In an aspect of the invention, methods and compositions which involve editing a target nucleic acid sequence, or modulating expression of a target nucleic acid sequence, and applications thereof in connection with cancer immunotherapy are comprehended by adapting the CRISPR-Cas system of the present invention. Reference is made to the application of gene therapy in WO 2015/161276 which involves methods and compositions which can be used to affect T-cell proliferation, survival and/or function by altering one or more T-cell expressed genes, e.g., one or more of FAS, BID, CTLA4, PDCD1, CBLB, PTPN6, TRAC and/or TRBC genes. In a related aspect, T-cell proliferation can be affected by altering one or more T-cell expressed genes, e.g., the CBLB and/or PTPN6 gene, FAS and/or BID gene, CTLA4 and/or PDCDI and/or TRAC and/or TRBC gene.

[1355] Chimeric antigen receptor (CAR)19 T-cells exhibit anti-leukemic effects in patient malignancies. However, leukemia patients often do not have enough T-cells to collect, meaning that treatment must involve modified T cells from donors. Accordingly, there is interest in establishing a bank of donor T-cells. Qasim et al. (“First Clinical Application of Talen Engineered Universal CAR19 T Cells in B-ALL” ASH 57th Annual Meeting and Exposition, Dec. 5-8, 2015, Abstract 2046 (https://ash.confex.com/ash/2015/webprogram/Paper81653. html published online November 2015) discusses modifying CAR19 T cells to eliminate the risk of graft-versus-host disease through the disruption of T-cell receptor expression and CD52 targeting. Furthermore, CD52 cells were targeted such that they became insensitive to Alemtuzumab, and thus allowed Alemtuzumab to prevent host-mediated rejection of human leukocyte antigen (HLA) mismatched CAR19 T-cells. Investigators used third generation self-inactivating lentiviral vector encoding a 4g7 CAR19 (CD19 scFv-4-1BB-CD3ζ) linked to RQR8, then electroporated cells with two pairs of TALEN mRNA for multiplex targeting for both the T-cell receptor (TCR) alpha constant chain locus and the CD52 gene locus. Cells which were still expressing TCR following ex vivo expansion were depleted using CliniMacs α/β TCR depletion, yielding a T-cell product (UCART19) with <1% TCR expression, 85% of which expressed CAR19, and 64% becoming CD52 negative. The modified CAR19 T cells were administered to treat a patient's relapsed acute lymphoblastic leukemia. The teachings provided herein provide effective methods for providing modified hematopoietic stem cells and progeny thereof, including but not limited to cells of the myeloid and lymphoid lineages of blood, including T cells, B cells, monocytes, macrophages, neutrophils, basophils, eosinophils, erythrocytes, dendritic cells, and megakaryocytes or platelets, and natural killer cells and their precursors and progenitors. Such cells can be modified by knocking out, knocking in, or otherwise modulating targets, for example to remove or modulate CD52 as described above, and other targets, such as, without limitation, CXCR4, and PD-1. Thus compositions, cells, and method of the invention can be used to modulate immune responses and to treat, without limitation, malignancies, viral infections, and immune disorders, in conjunction with modification of administration of T cells or other cells to patients.

[1356] Mention is made of WO 2015/148670 and through the teachings herein the invention comprehends methods and materials of this document applied in conjunction with the teachings herein. In an aspect of gene therapy, methods and compositions for editing of a target sequence related to or in connection with Human Immunodeficiency Virus (HIV) and Acquired Immunodeficiency Syndrome (AIDS) are comprehended. In a related aspect, the invention described herein comprehends prevention and treatment of HIV infection and AIDS, by introducing one or more mutations in the gene for C-C chemokine receptor type 5 (CCR5). The CCR5 gene is also known as CKR5, CCR-5, CD195, CKR-5, CCCKR5, CMKBR5, IDDM22, and CC-CKR-5. In a further aspect, the invention described herein comprehends provide for prevention or reduction of HIV infection and/or prevention or reduction of the ability for HIV to enter host cells, e.g., in subjects who are already infected. Exemplary host cells for HIV include, but are not limited to, CD4 cells, T cells, gut associated lymphatic tissue (GALT), macrophages, dendritic cells, myeloid precursor cell, and microglia. Viral entry into the host cells requires interaction of the viral glycoproteins gp41 and gp120 with both the CD4 receptor and a co-receptor, e.g., CCR5. If a co-receptor, e.g., CCR5, is not present on the surface of the host cells, the virus cannot bind and enter the host cells. The progress of the disease is thus impeded. By knocking out or knocking down CCR5 in the host cells, e.g., by introducing a protective mutation (such as a CCR5 delta 32 mutation), entry of the HIV virus into the host cells is prevented.

[1357] X-linked Chronic granulomatous disease (CGD) is a hereditary disorder of host defense due to absent or decreased activity of phagocyte NADPH oxidase. Using a CRISPR-Cas (Cpf1) system that targets and corrects the mutation (absent or decreased activity of phagocyte NADPH oxidase) (e.g., with a suitable HDR template that delivers a coding sequence for phagocyte NADPH oxidase); specifically, the gRNA can target mutation that gives rise to CGD (deficient phagocyte NADPH oxidase), and the HDR can provide coding for proper expression of phagocyte NADPH oxidase. An gRNA that targets the mutation-and-Cas (Cpf1) protein containing particle is contacted with HSCs carrying the mutation. The particle also can contain a suitable HDR template to correct the mutation for proper expression of phagocyte NADPH oxidase; or the HSC can be contacted with a second particle or a vector that contains or delivers the HDR template. The so contacted cells can be administered; and optionally treated/expanded; cf. Cartier. Fanconi anemia: Mutations in at least 15 genes (FANCA, FANCB, FANCC, FANCD1/BRCA2, FANCD2, FANCE, FANCF, FANCG, FANCI, FANCJ/BACH1/BRIP1, FANCL/PHF9/POG, FANCM, FANCN/PALB2, FANCO/Rad51C, and FANCP/SLX4/BTBD12) can cause Fanconi anemia. Proteins produced from these genes are involved in a cell process known as the FA pathway. The FA pathway is turned on (activated) when the process of making new copies of DNA, called DNA replication, is blocked due to DNA damage. The FA pathway sends certain proteins to the area of damage, which trigger DNA repair so DNA replication can continue. The FA pathway is particularly responsive to a certain type of DNA damage known as interstrand cross-links (ICLs). ICLs occur when two DNA building blocks (nucleotides) on opposite strands of DNA are abnormally attached or linked together, which stops the process of DNA replication. ICLs can be caused by a buildup of toxic substances produced in the body or by treatment with certain cancer therapy drugs. Eight proteins associated with Fanconi anemia group together to form a complex known as the FA core complex. The FA core complex activates two proteins, called FANCD2 and FANCI. The activation of these two proteins brings DNA repair proteins to the area of the ICL so the cross-link can be removed and DNA replication can continue. the FA core complex. More in particular, the FA core complex is a nuclear multiprotein complex consisting of FANCA, FANCB, FANCC, FANCE, FANCF, FANCG, FANCL, and FANCM, functions as an E3 ubiquitin ligase and mediates the activation of the ID complex, which is a heterodimer composed of FANCD2 and FANCI. Once monoubiquitinated, it interacts with classical tumor suppressors downstream of the FA pathway including FANCD1/BRCA2, FANCN/PALB2, FANCJ/BRIP1, and FANCO/Rad51C and thereby contributes to DNA repair via homologous recombination (HR). Eighty to 90 percent of FA cases are due to mutations in one of three genes, FANCA, FANCC, and FANCG. These genes provide instructions for producing components of the FA core complex. Mutations in such genes associated with the FA core complex will cause the complex to be nonfunctional and disrupt the entire FA pathway. As a result, DNA damage is not repaired efficiently and ICLs build up over time. Geiselhart, “Review Article, Disrupted Signaling through the Fanconi Anemia Pathway Leads to Dysfunctional Hematopoietic Stem Cell Biology: Underlying Mechanisms and Potential Therapeutic Strategies,” Anemia Volume 2012 (2012), Article ID 265790, http://dx.doi.org/10.1155/2012/265790 discussed FA and an animal experiment involving intrafemoral injection of a lentivirus encoding the FANCC gene resulting in correction of HSCs in vivo. Using a CRISPR-Cas (Cpf1) system that targets and one or more of the mutations associated with FA, for instance a CRISPR-Cas (Cpf1) system having gRNA(s) and HDR template(s) that respectively targets one or more of the mutations of FANCA, FANCC, or FANCG that give rise to FA and provide corrective expression of one or more of FANCA, FANCC or FANCG; e.g., the gRNA can target a mutation as to FANCC, and the HDR can provide coding for proper expression of FANCC. An gRNA that targets the mutation(s) (e.g., one or more involved in FA, such as mutation(s) as to any one or more of FANCA, FANCC or FANCG)-and-Cas (Cpf1) protein containing particle is contacted with HSCs carrying the mutation(s). The particle also can contain a suitable HDR template(s) to correct the mutation for proper expression of one or more of the proteins involved in FA, such as any one or more of FANCA, FANCC or FANCG; or the HSC can be contacted with a second particle or a vector that contains or delivers the HDR template. The so contacted cells can be administered; and optionally treated/expanded; cf. Cartier.

[1358] The particle in the herein discussion (e.g., as to containing gRNA(s) and Cas (Cpf1), optionally HDR template(s), or HDR template(s); for instance as to Hemophilia B, SCID, SCID-X1, ADA-SCID, Hereditary tyrosinemia, β-thalassemia, X-linked CGD, Wiskott-Aldrich syndrome, Fanconi anemia, adrenoleukodystrophy (ALD), metachromatic leukodystrophy (MLD), HIV/AIDS, Immunodeficiency disorder, Hematologic condition, or genetic lysosomal storage disease) is advantageously obtained or obtainable from admixing an gRNA(s) and Cas (Cpf1) protein mixture (optionally containing HDR template(s) or such mixture only containing HDR template(s) when separate particles as to template(s) is desired) with a mixture comprising or consisting essentially of or consisting of surfactant, phospholipid, biodegradable polymer, lipoprotein and alcohol (wherein one or more gRNA targets the genetic locus or loci in the HSC).

[1359] Indeed, the invention is especially suited for treating hematopoietic genetic disorders with genome editing, and immunodeficiency disorders, such as genetic immunodeficiency disorders, especially through using the particle technology herein-discussed. Genetic immunodeficiencies are diseases where genome editing interventions of the instant invention can successful. The reasons include: Hematopoietic cells, of which immune cells are a subset, are therapeutically accessible. They can be removed from the body and transplanted autologously or allogenically. Further, certain genetic immunodeficiencies, e.g., severe combined immunodeficiency (SCID), create a proliferative disadvantage for immune cells. Correction of genetic lesions causing SCID by rare, spontaneous ‘reverse’ mutations indicates that correcting even one lymphocyte progenitor may be sufficient to recover immune function in patients.../../../Users/t_kowalski/AppData/Local/Microsoft/Windows/Temporary Internet Files/Content. Outlook/GA8VY8LK/Treating SCID for Ellen.docx-_ENREF_1 See Bousso, P., et al. Diversity, functionality, and stability of the T cell repertoire derived in vivo from a single human T cell precursor. Proceedings of the National Academy of Sciences of the United States of America 97, 274-278 (2000). The selective advantage for edited cells allows for even low levels of editing to result in a therapeutic effect. This effect of the instant invention can be seen in SCID, Wiskott-Aldrich Syndrome, and the other conditions mentioned herein, including other genetic hematopoietic disorders such as alpha- and beta-thalassemia, where hemoglobin deficiencies negatively affect the fitness of erythroid progenitors.

[1360] The activity of NHEJ and HDR DSB repair varies significantly by cell type and cell state. NHEJ is not highly regulated by the cell cycle and is efficient across cell types, allowing for high levels of gene disruption in accessible target cell populations. In contrast, HDR acts primarily during S/G2 phase, and is therefore restricted to cells that are actively dividing, limiting treatments that require precise genome modifications to mitotic cells [Ciccia, A. & Elledge, S. J. Molecular cell 40, 179-204 (2010); Chapman, J. R., et al. Molecular cell 47, 497-510 (2012)].

[1361] The efficiency of correction via HDR may be controlled by the epigenetic state or sequence of the targeted locus, or the specific repair template configuration (single vs. double stranded, long vs. short homology arms) used [Hacein-Bey-Abina, S., et al. The New England journal of medicine 346, 1185-1193 (2002); Gaspar, H. B., et al. Lancet 364, 2181-2187 (2004); Beumer, K. J., et al. G3 (2013)]. The relative activity of NHEJ and HDR machineries in target cells may also affect gene correction efficiency, as these pathways may compete to resolve DSBs [Beumer, K. J., et al. Proceedings of the National Academy of Sciences of the United States of America 105, 19821-19826 (2008)]. HDR also imposes a delivery challenge not seen with NHEJ strategies, as it requires the concurrent delivery of nucleases and repair templates. In practice, these constraints have so far led to low levels of HDR in therapeutically relevant cell types. Clinical translation has therefore largely focused on NHEJ strategies to treat disease, although proof-of-concept preclinical HDR treatments have now been described for mouse models of haemophilia B and hereditary tyrosinemia [Li, H., et al. Nature 475, 217-221 (2011); Yin, H., et al. Nature biotechnology 32, 551-553 (2014)].

[1362] Any given genome editing application may comprise combinations of proteins, small RNA molecules, and/or repair templates, making delivery of these multiple parts substantially more challenging than small molecule therapeutics. Two main strategies for delivery of genome editing tools have been developed: ex vivo and in vivo. In ex vivo treatments, diseased cells are removed from the body, edited and then transplanted back into the patient. Ex vivo editing has the advantage of allowing the target cell population to be well defined and the specific dosage of therapeutic molecules delivered to cells to be specified. The latter consideration may be particularly important when off-target modifications are a concern, as titrating the amount of nuclease may decrease such mutations (Hsu et al., 2013). Another advantage of ex vivo approaches is the typically high editing rates that can be achieved, due to the development of efficient delivery systems for proteins and nucleic acids into cells in culture for research and gene therapy applications.

[1363] There may be drawbacks with ex vivo approaches that limit application to a small number of diseases. For instance, target cells must be capable of surviving manipulation outside the body. For many tissues, like the brain, culturing cells outside the body is a major challenge, because cells either fail to survive, or lose properties necessary for their function in vivo. Thus, in view of this disclosure and the knowledge in the art, ex vivo therapy as to tissues with adult stem cell populations amenable to ex vivo culture and manipulation, such as the hematopoietic system, by the CRISPR-Cas (Cpf1) system are enabled. [Bunn, H. F. & Aster, J. Pathophysiology of blood disorders, (McGraw-Hill, New York, 2011)]

[1364] In vivo genome editing involves direct delivery of editing systems to cell types in their native tissues. In vivo editing allows diseases in which the affected cell population is not amenable to ex vivo manipulation to be treated. Furthermore, delivering nucleases to cells in situ allows for the treatment of multiple tissue and cell types. These properties probably allow in vivo treatment to be applied to a wider range of diseases than ex vivo therapies.

[1365] To date, in vivo editing has largely been achieved through the use of viral vectors with defined, tissue-specific tropism. Such vectors are currently limited in terms of cargo carrying capacity and tropism, restricting this mode of therapy to organ systems where transduction with clinically useful vectors is efficient, such as the liver, muscle and eye [Kotterman, M. A. & Schaffer, D. V. Nature reviews. Genetics 15, 445-451 (2014); Nguyen, T. H. & Ferry, N. Gene therapy 11 Suppl 1, S76-84 (2004); Boye, S. E., et al. Molecular therapy: the journal of the American Society of Gene Therapy 21, 509-519 (2013)].

[1366] A potential barrier for in vivo delivery is the immune response that may be created in response to the large amounts of virus necessary for treatment, but this phenomenon is not unique to genome editing and is observed with other virus based gene therapies [Bessis, N., et al. Gene therapy 11 Suppl 1, S10-17 (2004)]. It is also possible that peptides from editing nucleases themselves are presented on MHC Class I molecules to stimulate an immune response, although there is little evidence to support this happening at the preclinical level. Another major difficulty with this mode of therapy is controlling the distribution and consequently the dosage of genome editing nucleases in vivo, leading to off-target mutation profiles that may be difficult to predict. However, in view of this disclosure and the knowledge in the art, including the use of virus- and particle-based therapies being used in the treatment of cancers, in vivo modification of HSCs, for instance by delivery by either particle or virus, is within the ambit of the skilled person.

[1367] Ex Vivo Editing Therapy: The long standing clinical expertise with the purification, culture and transplantation of hematopoietic cells has made diseases affecting the blood system such as SCID, Fanconi anemia, Wiskott-Aldrich syndrome and sickle cell anemia the focus of ex vivo editing therapy. Another reason to focus on hematopoietic cells is that, thanks to previous efforts to design gene therapy for blood disorders, delivery systems of relatively high efficiency already exist. With these advantages, this mode of therapy can be applied to diseases where edited cells possess a fitness advantage, so that a small number of engrafted, edited cells can expand and treat disease. One such disease is HIV, where infection results in a fitness disadvantage to CD4+ T cells.

[1368] Ex vivo editing therapy has been recently extended to include gene correction strategies. The barriers to HDR ex vivo were overcome in a recent paper from Genovese and colleagues, who achieved gene correction of a mutated IL2RG gene in hematopoietic stem cells (HSCs) obtained from a patient suffering from SCID-X1 [Genovese, P., et al. Nature 510, 235-240 (2014)]. Genovese et. al. accomplished gene correction in HSCs using a multimodal strategy. First, HSCs were transduced using integration-deficient lentivirus containing an HDR template encoding a therapeutic cDNA for IL2RG. Following transduction, cells were electroporated with mRNA encoding ZFNs targeting a mutational hotspot in IL2RG to stimulate HDR based gene correction. To increase HDR rates, culture conditions were optimized with small molecules to encourage HSC division. With optimized culture conditions, nucleases and HDR templates, gene corrected HSCs from the SCID-X1 patient were obtained in culture at therapeutically relevant rates. HSCs from unaffected individuals that underwent the same gene correction procedure could sustain long-term hematopoiesis in mice, the gold standard for HSC function. HSCs are capable of giving rise to all hematopoietic cell types and can be autologously transplanted, making them an extremely valuable cell population for all hematopoietic genetic disorders [Weissman, I. L. & Shizuru, J. A. Blood 112, 3543-3553 (2008)]. Gene corrected HSCs could, in principle, be used to treat a wide range of genetic blood disorders making this study an exciting breakthrough for therapeutic genome editing.

[1369] In Vivo Editing Therapy: In vivo editing can be used advantageously from this disclosure and the knowledge in the art. For organ systems where delivery is efficient, there have already been a number of exciting preclinical therapeutic successes. The first example of successful in vivo editing therapy was demonstrated in a mouse model of haemophilia B [Li, H., et al. Nature 475, 217-221 (2011)]. As noted earlier, Haemophilia B is an X-linked recessive disorder caused by loss-of-function mutations in the gene encoding Factor IX, a crucial component of the clotting cascade. Recovering Factor IX activity to above 1% of its levels in severely affected individuals can transform the disease into a significantly milder form, as infusion of recombinant Factor IX into such patients prophylactically from a young age to achieve such levels largely ameliorates clinical complications [Lofqvist, T., et al. Journal of internal medicine 241, 395-400 (1997)]. Thus, only low levels of HDR gene correction are necessary to change clinical outcomes for patients. In addition, Factor IX is synthesized and secreted by the liver, an organ that can be transduced efficiently by viral vectors encoding editing systems.

[1370] Using hepatotropic adeno-associated viral (AAV) serotypes encoding ZFNs and a corrective HDR template, up to 7% gene correction of a mutated, humanized Factor IX gene in the murine liver was achieved [Li, H., et al. Nature 475, 217-221 (2011)]. This resulted in improvement of clot formation kinetics, a measure of the function of the clotting cascade, demonstrating for the first time that in vivo editing therapy is not only feasible, but also efficacious. As discussed herein, the skilled person is positioned from the teachings herein and the knowledge in the art, e.g., Li to address Haemophilia B with a particle-containing HDR template and a CRISPR-Cas (Cpf1) system that targets the mutation of the X-linked recessive disorder to reverse the loss-of-function mutation.

[1371] Building on this study, other groups have recently used in vivo genome editing of the liver with CRISPR-Cas to successfully treat a mouse model of hereditary tyrosinemia and to create mutations that provide protection against cardiovascular disease. These two distinct applications demonstrate the versatility of this approach for disorders that involve hepatic dysfunction [Yin, H., et al. Nature biotechnology 32, 551-553 (2014); Ding, Q., et al. Circulation research 115, 488-492 (2014)]. Application of in vivo editing to other organ systems are necessary to prove that this strategy is widely applicable. Currently, efforts to optimize both viral and non-viral vectors are underway to expand the range of disorders that can be treated with this mode of therapy [Kotterman, M. A. & Schaffer, D. V. Nature reviews. Genetics 15, 445-451 (2014); Yin, H., et al. Nature reviews. Genetics 15, 541-555 (2014)]. As discussed herein, the skilled person is positioned from the teachings herein and the knowledge in the art, e.g., Yin to address hereditary tyrosinemia with a particle-containing HDR template and a CRISPR-Cas (Cpf1) system that targets the mutation.

[1372] Targeted deletion, therapeutic applications: Targeted deletion of genes may be preferred. Preferred are, therefore, genes involved in immunodeficiency disorder, hematologic condition, or genetic lysosomal storage disease, e.g., Hemophilia B, SCID, SCID-X1, ADA-SCID, Hereditary tyrosinemia, β-thalassemia, X-linked CGD, Wiskott-Aldrich syndrome, Fanconi anemia, adrenoleukodystrophy (ALD), metachromatic leukodystrophy (MLD), HIV/AIDS, other metabolic disorders, genes encoding mis-folded proteins involved in diseases, genes leading to loss-of-function involved in diseases; generally, mutations that can be targeted in an HSC, using any herein-discussed delivery system, with the particle system considered advantageous.

[1373] In the present invention, the immunogenicity of the CRISPR enzyme in particular may be reduced following the approach first set out in Tangri et al with respect to erythropoietin and subsequently developed. Accordingly, directed evolution or rational design may be used to reduce the immunogenicity of the CRISPR enzyme (for instance a Cpf1) in the host species (human or other species).

[1374] Genome editing: The CRISPR/Cas (Cpf1) systems of the present invention can be used to correct genetic mutations that were previously attempted with limited success using TALEN and ZFN and lentiviruses, including as herein discussed; see also WO2013163628.

### Treating Disease of the Brain, Central Nervous and Immune Systems

[1375] The present invention also contemplates delivering the CRISPR-Cas system to the brain or neurons. For example, RNA interference (RNAi) offers therapeutic potential for this disorder by reducing the expression of HTT, the disease-causing gene of Huntington's disease (see, e.g., McBride et al., Molecular Therapy vol. 19 no. 12 Dec. 2011, pp. 2152-2162), therefore Applicant postulates that it may be used/and or adapted to the CRISPR-Cas system. The CRISPR-Cas system may be generated using an algorithm to reduce the off-targeting potential of antisense sequences. The CRISPR-Cas sequences may target either a sequence in exon 52 of mouse, rhesus or human huntingtin and expressed in a viral vector, such as AAV. Animals, including humans, may be injected with about three microinjections per hemisphere (six injections total): the first 1 mm rostral to the anterior commissure (12 μl) and the two remaining injections (12 μl and 10 μl, respectively) spaced 3 and 6 mm caudal to the first injection with 1e12 vg/ml of AAV at a rate of about 1 μl/minute, and the needle was left in place for an additional 5 minutes to allow the injectate to diffuse from the needle tip.

[1376] DiFiglia et al. (PNAS, Oct. 23, 2007, vol. 104, no. 43, 17204-17209) observed that single administration into the adult striatum of an siRNA targeting Htt can silence mutant Htt, attenuate neuronal pathology, and delay the abnormal behavioral phenotype observed in a rapid-onset, viral transgenic mouse model of HD. DiFiglia injected mice intrastriatally with 2 μl of Cy3-labeled cc-siRNA-Htt or unconjugated siRNA-Htt at 10 μM. A similar dosage of CRISPR Cas targeted to Htt may be contemplated for humans in the present invention, for example, about 5-10 ml of 10 μM CRISPR Cas targeted to Htt may be injected intrastriatally.

[1377] In another example, Boudreau et al. (Molecular Therapy vol. 17 no. 6 Jun. 2009) injects 5 μl of recombinant AAV serotype 2/1 vectors expressing htt-specific RNAi virus (at 4×10¹² viral genomes/ml) into the straiatum. A similar dosage of CRISPR Cas targeted to Htt may be contemplated for humans in the present invention, for example, about 10-20 ml of 4×10¹² viral genomes/ml) CRISPR Cas targeted to Htt may be injected intrastriatally.

[1378] In another example, a CRISPR Cas targeted to HTT may be administered continuously (see, e.g., Yu et al., Cell 150, 895-908, Aug. 31, 2012). Yu et al. utilizes osmotic pumps delivering 0.25 ml/hr (Model 2004) to deliver 300 mg/day of ss-siRNA or phosphate-buffered saline (PBS) (Sigma Aldrich) for 28 days, and pumps designed to deliver 0.5 μl/hr (Model 2002) were used to deliver 75 mg/day of the positive control MOE ASO for 14 days. Pumps (Durect Corporation) were filled with ss-siRNA or MOE diluted in sterile PBS and then incubated at 37 C for 24 or 48 (Model 2004) hours prior to implantation. Mice were anesthetized with 2.5% isofluorane, and a midline incision was made at the base of the skull. Using stereotaxic guides, a cannula was implanted into the right lateral ventricle and secured with Loctite adhesive. A catheter attached to an Alzet osmotic mini pump was attached to the cannula, and the pump was placed subcutaneously in the midscapular area. The incision was closed with 5.0 nylon sutures. A similar dosage of CRISPR Cas targeted to Htt may be contemplated for humans in the present invention, for example, about 500 to 1000 g/day CRISPR Cas targeted to Htt may be administered.

[1379] In another example of continuous infusion, Stiles et al. (Experimental Neurology 233 (2012) 463-471) implanted an intraparenchymal catheter with a titanium needle tip into the right putamen. The catheter was connected to a SynchroMed® II Pump (Medtronic Neurological, Minneapolis, Minn.) subcutaneously implanted in the abdomen. After a 7 day infusion of phosphate buffered saline at 6 μL/day, pumps were re-filled with test article and programmed for continuous delivery for 7 days. About 2.3 to 11.52 mg/d of siRNA were infused at varying infusion rates of about 0.1 to 0.5 μL/min. A similar dosage of CRISPR Cas targeted to Htt may be contemplated for humans in the present invention, for example, about 20 to 200 mg/day CRISPR Cas targeted to Htt may be administered. In another example, the methods of US Patent Publication No. 20130253040 assigned to Sangamo may also be also be adapted from TALES to the nucleic acid-targeting system of the present invention for treating Huntington's Disease.

[1380] In another example, the methods of US Patent Publication No. 20130253040 (WO2013130824) assigned to Sangamo may also be also be adapted from TALES to the CRISPR Cas system of the present invention for treating Huntington's Disease.

[1381] WO2015089354 A1 in the name of The Broad Institute et al., hereby incorporated by reference, describes a targets for Huntington's Disease (HP). Possible target genes of CRISPR complex in regard to Huntington's Disease: PRKCE; IGF1; EP300; RCOR1; PRKCZ; HDAC4; and TGM2. Accordingly, one or more of PRKCE; IGF1; EP300; RCOR1; PRKCZ; HDAC4; and TGM2 may be selected as targets for Huntington's Disease in some embodiments of the present invention.

[1382] Other trinucleotide repeat disorders. These may include any of the following: Category I includes Huntington's disease (HD) and the spinocerebellar ataxias; Category II expansions are phenotypically diverse with heterogeneous expansions that are generally small in magnitude, but also found in the exons of genes; and Category III includes fragile X syndrome, myotonic dystrophy, two of the spinocerebellar ataxias, juvenile myoclonic epilepsy, and Friedreich's ataxia.

[1383] A further aspect of the invention relates to utilizing the CRISPR-Cas system for correcting defects in the EMP2A and EMP2B genes that have been identified to be associated with Lafora disease. Lafora disease is an autosomal recessive condition which is characterized by progressive myoclonus epilepsy which may start as epileptic seizures in adolescence. A few cases of the disease may be caused by mutations in genes yet to be identified. The disease causes seizures, muscle spasms, difficulty walking, dementia, and eventually death. There is currently no therapy that has proven effective against disease progression. Other genetic abnormalities associated with epilepsy may also be targeted by the CRISPR-Cas system and the underlying genetics is further described in Genetics of Epilepsy and Genetic Epilepsies, edited by Giuliano Avanzini, Jeffrey L. Noebels, Mariani Foundation Paediatric Neurology: 20; 2009).

[1384] The methods of US Patent Publication No. 20110158957 assigned to Sangamo BioSciences, Inc. involved in inactivating T cell receptor (TCR) genes may also be modified to the CRISPR Cas system of the present invention. In another example, the methods of US Patent Publication No. 20100311124 assigned to Sangamo BioSciences, Inc. and US Patent Publication No. 20110225664 assigned to Cellectis, which are both involved in inactivating glutamine synthetase gene expression genes may also be modified to the CRISPR Cas system of the present invention.

[1385] Delivery options for the brain include encapsulation of CRISPR enzyme and guide RNA in the form of either DNA or RNA into liposomes and conjugating to molecular Trojan horses for trans-blood brain barrier (BBB) delivery. Molecular Trojan horses have been shown to be effective for delivery of B-gal expression vectors into the brain of non-human primates. The same approach can be used to delivery vectors containing CRISPR enzyme and guide RNA. For instance, Xia C F and Boado R J, Pardridge W M (“Antibody-mediated targeting of siRNA via the human insulin receptor using avidin-biotin technology.” Mol Pharm. 2009 May-June; 6(3):747-51. doi: 10.1021/mp800194) describes how delivery of short interfering RNA (siRNA) to cells in culture, and in vivo, is possible with combined use of a receptor-specific monoclonal antibody (mAb) and avidin-biotin technology. The authors also report that because the bond between the targeting mAb and the siRNA is stable with avidin-biotin technology, and RNAi effects at distant sites such as brain are observed in vivo following an intravenous administration of the targeted siRNA.

[1386] Zhang et al. (Mol Ther. 2003 January; 7(1):11-8.)) describe how expression plasmids encoding reporters such as luciferase were encapsulated in the interior of an “artificial virus” comprised of an 85 nm pegylated immunoliposome, which was targeted to the rhesus monkey brain in vivo with a monoclonal antibody (MAb) to the human insulin receptor (HIR). The HIRMAb enables the liposome carrying the exogenous gene to undergo transcytosis across the blood-brain barrier and endocytosis across the neuronal plasma membrane following intravenous injection. The level of luciferase gene expression in the brain was 50-fold higher in the rhesus monkey as compared to the rat. Widespread neuronal expression of the beta-galactosidase gene in primate brain was demonstrated by both histochemistry and confocal microscopy. The authors indicate that this approach makes feasible reversible adult transgenics in 24 hours. Accordingly, the use of immunoliposome is preferred. These may be used in conjunction with antibodies to target specific tissues or cell surface proteins.

### Alzheimer's Disease

[1387] US Patent Publication No. 20110023153, describes use of zinc finger nucleases to genetically modify cells, animals and proteins associated with Alzheimer's Disease. Once modified cells and animals may be further tested using known methods to study the effects of the targeted mutations on the development and/or progression of AD using measures commonly used in the study of AD—such as, without limitation, learning and memory, anxiety, depression, addiction, and sensory motor functions as well as assays that measure behavioral, functional, pathological, metaboloic and biochemical function.

[1388] The present disclosure comprises editing of any chromosomal sequences that encode proteins associated with AD. The AD-related proteins are typically selected based on an experimental association of the AD-related protein to an AD disorder. For example, the production rate or circulating concentration of an AD-related protein may be elevated or depressed in a population having an AD disorder relative to a population lacking the AD disorder. Differences in protein levels may be assessed using proteomic techniques including but not limited to Western blot, immunohistochemical staining, enzyme linked immunosorbent assay (ELISA), and mass spectrometry. Alternatively, the AD-related proteins may be identified by obtaining gene expression profiles of the genes encoding the proteins using genomic techniques including but not limited to DNA microarray analysis, serial analysis of gene expression (SAGE), and quantitative real-time polymerase chain reaction (Q-PCR).

[1389] Examples of Alzheimer's disease associated proteins may include the very low density lipoprotein receptor protein (VLDLR) encoded by the VLDLR gene, the ubiquitin-like modifier activating enzyme 1 (UBA1) encoded by the UBA1 gene, or the NEDD8-activating enzyme E1 catalytic subunit protein (UBE1C) encoded by the UBA3 gene, for example.

[1390] By way of non-limiting example, proteins associated with AD include but are not limited to the proteins listed as follows: Chromosomal Sequence Encoded Protein ALAS2 Delta-aminolevulinate synthase 2 (ALAS2) ABCA1 ATP-binding cassette transporter (ABCA1) ACE Angiotensin I-converting enzyme (ACE) APOE Apolipoprotein E precursor (APOE) APP amyloid precursor protein (APP) AQP1 aquaporin 1 protein (AQP1) BIN1 Myc box-dependent-interacting protein 1 or bridging integrator 1 protein (BIN1) BDNF brain-derived neurotrophic factor (BDNF) BTNL8 Butyrophilin-like protein 8 (BTNL8) C1ORF49 chromosome 1 open reading frame 49 CDH4 Cadherin-4 CHRNB2 Neuronal acetylcholine receptor subunit beta-2 CKLFSF2 CKLF-like MARVEL transmembrane domain-containing protein 2 (CKLFSF2) CLEC4E C-type lectin domain family 4, member e (CLEC4E) CLU clusterin protein (also known as apoplipoprotein J) CR1 Erythrocyte complement receptor 1 (CR1, also known as CD35, C3b/C4b receptor and immune adherence receptor) CR1L Erythrocyte complement receptor 1 (CR1L) CSF3R granulocyte colony-stimulating factor 3 receptor (CSF3R) CST3 Cystatin C or cystatin 3 CYP2C Cytochrome P450 2C DAPK1 Death-associated protein kinase 1 (DAPK1) ESR1 Estrogen receptor 1 FCAR Fc fragment of IgA receptor (FCAR, also known as CD89) FCGR3B Fc fragment of IgG, low affinity IIIb, receptor (FCGR3B or CD16b) FFA2 Free fatty acid receptor 2 (FFA2) FGA Fibrinogen (Factor I) GAB2 GRB2-associated-binding protein 2 (GAB2) GAB2 GRB2-associated-binding protein 2 (GAB2) GALP Galanin-like peptide GAPDHS Glyceraldehyde-3-phosphate dehydrogenase, spermatogenic (GAPDHS) GMPB GMBP HP Haptoglobin (HP) HTR7 5-hydroxytryptamine (serotonin) receptor 7 (adenylate cyclase-coupled) IDE Insulin degrading enzyme IF127 IF127 IFI6 Interferon, alpha-inducible protein 6 (IFI6) IFIT2 Interferon-induced protein with tetratricopeptide repeats 2 (IFIT2) IL1RN interleukin-1 receptor antagonist (IL-1RA) IL8RA Interleukin 8 receptor, alpha (IL8RA or CD181) IL8RB Interleukin 8 receptor, beta (IL8RB) JAG1 Jagged 1 (JAG1) KCNJ15 Potassium inwardly-rectifying channel, subfamily J, member 15 (KCNJ15) LRP6 Low-density lipoprotein receptor-related protein 6 (LRP6) MAPT microtubule-associated protein tau (MAPT) MARK4 MAP/microtubule affinity-regulating kinase 4 (MARK4) MPHOSPH1 M-phase phosphoprotein 1 MTHFR 5,10-methylenetetrahydrofolate reductase MX2 Interferon-induced GTP-binding protein Mx2 NBN Nibrin, also known as NBN NCSTN Nicastrin NIACR2 Niacin receptor 2 (NIACR2, also known as GPR109B) NMNAT3 nicotinamide nucleotide adenylyltransferase 3 NTM Neurotrimin (or HNT) ORM1 Orosmucoid 1 (ORM1) or Alpha-1-acid glycoprotein 1 P2RY13 P2Y purinoceptor 13 (P2RY13) PBEF1 Nicotinamide phosphoribosyltransferase (NAmPRTase or Nampt) also known as pre-B-cell colony-enhancing factor 1 (PBEF1) or visfatin PCK1 Phosphoenolpyruvate carboxykinase PICALM phosphatidylinositol binding clathrin assembly protein (PICALM) PLAU Urokinase-type plasminogen activator (PLAU) PLXNC1 Plexin C1 (PLXNC1) PRNP Prion protein PSEN1 presenilin 1 protein (PSEN1) PSEN2 presenilin 2 protein (PSEN2) PTPRA protein tyrosine phosphatase receptor type A protein (PTPRA) RALGPS2 Ral GEF with PH domain and SH3 binding motif 2 (RALGPS2) RGSL2 regulator of G-protein signaling like 2 (RGSL2) SELENBP1 Selenium binding protein 1 (SELNBP1) SLC25A37 Mitoferrin-1 SORL1 sortilin-related receptor L(DLR class) A repeats-containing protein (SORL1) TF Transferrin TFAM Mitochondrial transcription factor A TNF Tumor necrosis factor TNFRSF10C Tumor necrosis factor receptor superfamily member 10C (TNFRSF10C) TNFSF10 Tumor necrosis factor receptor superfamily, (TRAIL) member 10a (TNFSF10) UBA1 ubiquitin-like modifier activating enzyme 1 (UBA1) UBA3 NEDD8-activating enzyme E1 catalytic subunit protein (UBE1C) UBB ubiquitin B protein (UBB) UBQLN1 Ubiquilin-1 UCHL1 ubiquitin carboxyl-terminal esterase L1 protein (UCHL1) UCHL3 ubiquitin carboxyl-terminal hydrolase isozyme L3 protein (UCHL3) VLDLR very low density lipoprotein receptor protein (VLDLR)

[1391] In exemplary embodiments, the proteins associated with AD whose chromosomal sequence is edited may be the very low density lipoprotein receptor protein (VLDLR) encoded by the VLDLR gene, the ubiquitin-like modifier activating enzyme 1 (UBA1) encoded by the UBA1 gene, the NEDD8-activating enzyme E1 catalytic subunit protein (UBE1C) encoded by the UBA3 gene, the aquaporin 1 protein (AQP1) encoded by the AQP1 gene, the ubiquitin carboxyl-terminal esterase L1 protein (UCHL1) encoded by the UCHL1 gene, the ubiquitin carboxyl-terminal hydrolase isozyme L3 protein (UCHL3) encoded by the UCHL3 gene, the ubiquitin B protein (UBB) encoded by the UBB gene, the microtubule-associated protein tau (MAPT) encoded by the MAPT gene, the protein tyrosine phosphatase receptor type A protein (PTPRA) encoded by the PTPRA gene, the phosphatidylinositol binding clathrin assembly protein (PICALM) encoded by the PICALM gene, the clusterin protein (also known as apoplipoprotein J) encoded by the CLU gene, the presenilin 1 protein encoded by the PSEN1 gene, the presenilin 2 protein encoded by the PSEN2 gene, the sortilin-related receptor L(DLR class) A repeats-containing protein (SORL1) protein encoded by the SORL1 gene, the amyloid precursor protein (APP) encoded by the APP gene, the Apolipoprotein E precursor (APOE) encoded by the APOE gene, or the brain-derived neurotrophic factor (BDNF) encoded by the BDNF gene. In an exemplary embodiment, the genetically modified animal is a rat, and the edited chromosomal sequence encoding the protein associated with AD is as follows: APP amyloid precursor protein (APP) NM_019288 AQP1 aquaporin 1 protein (AQP1) NM_012778 BDNF Brain-derived neurotrophic factor NM_012513 CLU clusterin protein (also known as NM_053021 apoplipoprotein J) MAPT microtubule-associated protein NM_017212 tau (MAPT) PICALM phosphatidylinositol binding NM_053554 clathrin assembly protein (PICALM) PSEN1 presenilin 1 protein (PSEN1) NM_019163 PSEN2 presenilin 2 protein (PSEN2) NM_031087 PTPRA protein tyrosine phosphatase NM_012763 receptor type A protein (PTPRA) SORL1 sortilin-related receptor L(DLR NM_053519, class) A repeats-containing XM_001065506, protein (SORL1) XM_217115 UBA1 ubiquitin-like modifier activating NM_001014080 enzyme 1 (UBA1) UBA3 NEDD8-activating enzyme E1 NM_057205 catalytic subunit protein (UBE1C) UBB ubiquitin B protein (UBB) NM_138895 UCHL1 ubiquitin carboxyl-terminal NM 017237 esterase L1 protein (UCHL1) UCHL3 ubiquitin carboxyl-terminal NM_001110165 hydrolase isozyme L3 protein (UCHL3) VLDLR very low density lipoprotein NM_013155 receptor protein (VLDLR)

[1392] The animal or cell may comprise 1, 2, 3, 4, 5, 6, 7, 8, 9, 10, 11, 12, 13, 14, 15 or more disrupted chromosomal sequences encoding a protein associated with AD and zero, 1, 2, 3, 4, 5, 6, 7, 8, 9, 10, 11, 12, 13, 14, 15 or more chromosomally integrated sequences encoding a protein associated with AD.

[1393] The edited or integrated chromosomal sequence may be modified to encode an altered protein associated with AD. A number of mutations in AD-related chromosomal sequences have been associated with AD. For instance, the V7171 (i.e. valine at position 717 is changed to isoleucine) missense mutation in APP causes familial AD. Multiple mutations in the presenilin-1 protein, such as H163R (i.e. histidine at position 163 is changed to arginine), A246E (i.e. alanine at position 246 is changed to glutamate), L286V (i.e. leucine at position 286 is changed to valine) and C410Y (i.e. cysteine at position 410 is changed to tyrosine) cause familial Alzheimer's type 3. Mutations in the presenilin-2 protein, such as N141 I (i.e. asparagine at position 141 is changed to isoleucine), M239V (i.e. methionine at position 239 is changed to valine), and D439A (i.e. aspartate at position 439 is changed to alanine) cause familial Alzheimer's type 4. Other associations of genetic variants in AD-associated genes and disease are known in the art. See, for example, Waring et al. (2008) Arch. Neurol. 65:329-334, the disclosure of which is incorporated by reference herein in its entirety.

### Secretase Disorders

[1394] US Patent Publication No. 20110023146, describes use of zinc finger nucleases to genetically modify cells, animals and proteins associated with secretase-associated disorders. Secretases are essential for processing pre-proteins into their biologically active forms. Defects in various components of the secretase pathways contribute to many disorders, particularly those with hallmark amyloidogenesis or amyloid plaques, such as Alzheimer's disease (AD).

[1395] A secretase disorder and the proteins associated with these disorders are a diverse set of proteins that effect susceptibility for numerous disorders, the presence of the disorder, the severity of the disorder, or any combination thereof. The present disclosure comprises editing of any chromosomal sequences that encode proteins associated with a secretase disorder. The proteins associated with a secretase disorder are typically selected based on an experimental association of the secretase-related proteins with the development of a secretase disorder. For example, the production rate or circulating concentration of a protein associated with a secretase disorder may be elevated or depressed in a population with a secretase disorder relative to a population without a secretase disorder. Differences in protein levels may be assessed using proteomic techniques including but not limited to Western blot, immunohistochemical staining, enzyme linked immunosorbent assay (ELISA), and mass spectrometry. Alternatively, the protein associated with a secretase disorder may be identified by obtaining gene expression profiles of the genes encoding the proteins using genomic techniques including but not limited to DNA microarray analysis, serial analysis of gene expression (SAGE), and quantitative real-time polymerase chain reaction (Q-PCR).

[1396] By way of non-limiting example, proteins associated with a secretase disorder include PSENEN (presenilin enhancer 2 homolog (C. elegans)), CTSB (cathepsin B), PSEN1 (presenilin 1), APP (amyloid beta (A4) precursor protein), APH1B (anterior pharynx defective 1 homolog B (C. elegans)), PSEN2 (presenilin 2 (Alzheimer disease 4)), BACE1 (beta-site APP-cleaving enzyme 1), ITM2B (integral membrane protein 2B), CTSD (cathepsin D), NOTCH1 (Notch homolog 1, translocation-associated (Drosophila)), TNF (tumor necrosis factor (TNF superfamily, member 2)), INS (insulin), DYT10 (dystonia 10), ADAM17 (ADAM metallopeptidase domain 17), APOE (apolipoprotein E), ACE (angiotensin I converting enzyme (peptidyl-dipeptidase A) 1), STN (statin), TP53 (tumor protein p53), IL6 (interleukin 6 (interferon, beta 2)), NGFR (nerve growth factor receptor (TNFR superfamily, member 16)), IL1B (interleukin 1, beta), ACHE (acetylcholinesterase (Yt blood group)), CTNNB1 (catenin (cadherin-associated protein), beta 1, 88 kDa), IGF1 (insulin-like growth factor 1 (somatomedin C)), IFNG (interferon, gamma), NRG1 (neuregulin 1), CASP3 (caspase 3, apoptosis-related cysteine peptidase), MAPK1 (mitogen-activated protein kinase 1), CDH1 (cadherin 1, type 1, E-cadherin (epithelial)), APBB1 (amyloid beta (A4) precursor protein-binding, family B, member 1 (Fe65)), HMGCR (3-hydroxy-3-methylglutaryl-Coenzyme A reductase), CREB1 (cAMP responsive element binding protein 1), PTGS2 (prostaglandin-endoperoxide synthase 2 (prostaglandin G/H synthase and cyclooxygenase)), HES1 (hairy and enhancer of split 1, (Drosophila)), CAT (catalase), TGFB1 (transforming growth factor, beta 1), ENO2 (enolase 2 (gamma, neuronal)), ERBB4 (v-erb-a erythroblastic leukemia viral oncogene homolog 4 (avian)), TRAPPC10 (trafficking protein particle complex 10), MAOB (monoamine oxidase B), NGF (nerve growth factor (beta polypeptide)), MMP12 (matrix metallopeptidase 12 (macrophage elastase)), JAG1 (jagged 1 (Alagille syndrome)), CD40LG (CD40 ligand), PPARG (peroxisome proliferator-activated receptor gamma), FGF2 (fibroblast growth factor 2 (basic)), IL3 (interleukin 3 (colony-stimulating factor, multiple)), LRP1 (low density lipoprotein receptor-related protein 1), NOTCH4 (Notch homolog 4 (Drosophila)), MAPK8 (mitogen-activated protein kinase 8), PREP (prolyl endopeptidase), NOTCH3 (Notch homolog 3 (Drosophila)), PRNP (prion protein), CTSG (cathepsin G), EGF (epidermal growth factor (beta-urogastrone)), REN (renin), CD44 (CD44 molecule (Indian blood group)), SELP (selectin P (granule membrane protein 140 kDa, antigen CD62)), GHR (growth hormone receptor), ADCYAP1 (adenylate cyclase activating polypeptide 1 (pituitary)), INSR (insulin receptor), GFAP (glial fibrillary acidic protein), MMP3 (matrix metallopeptidase 3 (stromelysin 1, progelatinase)), MAPK10 (mitogen-activated protein kinase 10), SP1 (Sp1 transcription factor), MYC (v-myc myelocytomatosis viral oncogene homolog (avian)), CTSE (cathepsin E), PPARA (peroxisome proliferator-activated receptor alpha), JUN (jun oncogene), TIMP1 (TIMP metallopeptidase inhibitor 1), IL5 (interleukin 5 (colony-stimulating factor, eosinophil)), IL1A (interleukin 1, alpha), MMP9 (matrix metallopeptidase 9 (gelatinase B, 92 kDa gelatinase, 92 kDa type IV collagenase)), HTR4 (5-hydroxytryptamine (serotonin) receptor 4), HSPG2 (heparan sulfate proteoglycan 2), KRAS (v-Ki-ras2 Kirsten rat sarcoma viral oncogene homolog), CYCS (cytochrome c, somatic), SMG1 (SMG1 homolog, phosphatidylinositol 3-kinase-related kinase (C. elegans)), IL1R1 (interleukin 1 receptor, type I), PROK1 (prokineticin 1), MAPK3 (mitogen-activated protein kinase 3), NTRK1 (neurotrophic tyrosine kinase, receptor, type 1), IL13 (interleukin 13), MME (membrane metallo-endopeptidase), TKT (transketolase), CXCR2 (chemokine (C-X-C motif) receptor 2), IGF1R (insulin-like growth factor 1 receptor), RARA (retinoic acid receptor, alpha), CREBBP (CREB binding protein), PTGS1 (prostaglandin-endoperoxide synthase 1 (prostaglandin G/H synthase and cyclooxygenase)), GALT (galactose-1-phosphate uridylyltransferase), CHRM1 (cholinergic receptor, muscarinic 1), ATXN1 (ataxin 1), PAWR (PRKC, apoptosis, WT1, regulator), NOTCH2 (Notch homolog 2 (Drosophila)), M6PR (mannose-6-phosphate receptor (cation dependent)), CYP46A1 (cytochrome P450, family 46, subfamily A, polypeptide 1), CSNK1 D (casein kinase 1, delta), MAPK14 (mitogen-activated protein kinase 14), PRG2 (proteoglycan 2, bone marrow (natural killer cell activator, eosinophil granule major basic protein)), PRKCA (protein kinase C, alpha), L1 CAM (L1 cell adhesion molecule), CD40 (CD40 molecule, TNF receptor superfamily member 5), NR1I2 (nuclear receptor subfamily 1, group I, member 2), JAG2 (jagged 2), CTNND1 (catenin (cadherin-associated protein), delta 1), CDH2 (cadherin 2, type 1, N-cadherin (neuronal)), CMA1 (chymase 1, mast cell), SORT1 (sortilin 1), DLK1 (delta-like 1 homolog (Drosophila)), THEM4 (thioesterase superfamily member 4), JUP (junction plakoglobin), CD46 (CD46 molecule, complement regulatory protein), CCL11 (chemokine (C-C motif) ligand 11), CAV3 (caveolin 3), RNASE3 (ribonuclease, RNase A family, 3 (eosinophil cationic protein)), HSPA8 (heat shock 70 kDa protein 8), CASP9 (caspase 9, apoptosis-related cysteine peptidase), CYP3A4 (cytochrome P450, family 3, subfamily A, polypeptide 4), CCR3 (chemokine (C-C motif) receptor 3), TFAP2A (transcription factor AP-2 alpha (activating enhancer binding protein 2 alpha)), SCP2 (sterol carrier protein 2), CDK4 (cyclin-dependent kinase 4), HIF1A (hypoxia inducible factor 1, alpha subunit (basic helix-loop-helix transcription factor)), TCF7L2 (transcription factor 7-like 2 (T-cell specific, HMG-box)), IL1R2 (interleukin 1 receptor, type II), B3GALTL (beta 1,3-galactosyltransferase-like), MDM2 (Mdm2 p53 binding protein homolog (mouse)), RELA (v-rel reticuloendotheliosis viral oncogene homolog A (avian)), CASP7 (caspase 7, apoptosis-related cysteine peptidase), IDE (insulin-degrading enzyme), FABP4 (fatty acid binding protein 4, adipocyte), CASK (calcium/calmodulin-dependent serine protein kinase (MAGUK family)), ADCYAP1R1 (adenylate cyclase activating polypeptide 1 (pituitary) receptor type I), ATF4 (activating transcription factor 4 (tax-responsive enhancer element B67)), PDGFA (platelet-derived growth factor alpha polypeptide), C21 or f33 (chromosome 21 open reading frame 33), SCG5 (secretogranin V (7B2 protein)), RNF123 (ring finger protein 123), NFKB1 (nuclear factor of kappa light polypeptide gene enhancer in B-cells 1), ERBB2 (v-erb-b2 erythroblastic leukemia viral oncogene homolog 2, neuro/glioblastoma derived oncogene homolog (avian)), CAV1 (caveolin 1, caveolae protein, 22 kDa), MMP7 (matrix metallopeptidase 7 (matrilysin, uterine)), TGFA (transforming growth factor, alpha), RXRA (retinoid X receptor, alpha), STX1A (syntaxin 1A (brain)), PSMC4 (proteasome (prosome, macropain) 26S subunit, ATPase, 4), P2RY2 (purinergic receptor P2Y, G-protein coupled, 2), TNFRSF21 (tumor necrosis factor receptor superfamily, member 21), DLG1 (discs, large homolog 1 (Drosophila)), NUMBL (numb homolog (Drosophila)-like), SPN (sialophorin), PLSCR1 (phospholipid scramblase 1), UBQLN2 (ubiquilin 2), UBQLN1 (ubiquilin 1), PCSK7 (proprotein convertase subtilisin/kexin type 7), SPON1 (spondin 1, extracellular matrix protein), SILV (silver homolog (mouse)), QPCT (glutaminyl-peptide cyclotransferase), HESS (hairy and enhancer of split 5 (Drosophila)), GCC1 (GRIP and coiled-coil domain containing 1), and any combination thereof.

[1397] The genetically modified animal or cell may comprise 1, 2, 3, 4, 5, 6, 7, 8, 9, 10 or more disrupted chromosomal sequences encoding a protein associated with a secretase disorder and zero, 1, 2, 3, 4, 5, 6, 7, 8, 9, 10 or more chromosomally integrated sequences encoding a disrupted protein associated with a secretase disorder.

### ALS

[1398] US Patent Publication No. 20110023144, describes use of zinc finger nucleases to genetically modify cells, animals and proteins associated with amyotrophyic lateral sclerosis (ALS) disease. ALS is characterized by the gradual steady degeneration of certain nerve cells in the brain cortex, brain stem, and spinal cord involved in voluntary movement.

[1399] Motor neuron disorders and the proteins associated with these disorders are a diverse set of proteins that effect susceptibility for developing a motor neuron disorder, the presence of the motor neuron disorder, the severity of the motor neuron disorder or any combination thereof. The present disclosure comprises editing of any chromosomal sequences that encode proteins associated with ALS disease, a specific motor neuron disorder. The proteins associated with ALS are typically selected based on an experimental association of ALS-related proteins to ALS. For example, the production rate or circulating concentration of a protein associated with ALS may be elevated or depressed in a population with ALS relative to a population without ALS. Differences in protein levels may be assessed using proteomic techniques including but not limited to Western blot, immunohistochemical staining, enzyme linked immunosorbent assay (ELISA), and mass spectrometry. Alternatively, the proteins associated with ALS may be identified by obtaining gene expression profiles of the genes encoding the proteins using genomic techniques including but not limited to DNA microarray analysis, serial analysis of gene expression (SAGE), and quantitative real-time polymerase chain reaction (Q-PCR).

[1400] By way of non-limiting example, proteins associated with ALS include but are not limited to the following proteins: SOD1 superoxide dismutase 1, ALS3 amyotrophic lateral soluble sclerosis 3 SETX senataxin ALS5 amyotrophic lateral sclerosis 5 FUS fused in sarcoma ALS7 amyotrophic lateral sclerosis 7 ALS2 amyotrophic lateral DPP6 Dipeptidyl-peptidase 6 sclerosis 2 NEFH neurofilament, heavy PTGS1 prostaglandin-polypeptide endoperoxide synthase 1 SLC1A2 solute carrier family 1 TNFRSF10B tumor necrosis factor (glial high affinity receptor superfamily, glutamate transporter), member 10b member 2 PRPH peripherin HSP90AA1 heat shock protein 90 kDa alpha (cytosolic), class A member 1 GRIA2 glutamate receptor, IFNG interferon, gamma ionotropic, AMPA 2 S100B S100 calcium binding FGF2 fibroblast growth factor 2 protein B AOX1 aldehyde oxidase 1 CS citrate synthase TARDBP TAR DNA binding protein TXN thioredoxin RAPH1 Ras association MAP3K5 mitogen-activated protein (RaIGDS/AF-6) and kinase 5 pleckstrin homology domains 1 NBEAL1 neurobeachin-like 1 GPX1 glutathione peroxidase 1 ICA1L islet cell autoantigen RAC1 ras-related C3 botulinum 1.69 kDa-like toxin substrate 1 MAPT microtubule-associated ITPR2 inositol 1,4,5-protein tau triphosphate receptor, type 2 ALS2CR4 amyotrophic lateral GLS glutaminase sclerosis 2 (juvenile) chromosome region, candidate 4 ALS2CR8 amyotrophic lateral CNTFR ciliary neurotrophic factor sclerosis 2 (juvenile) receptor chromosome region, candidate 8 ALS2CR11 amyotrophic lateral FOLH1 folate hydrolase 1 sclerosis 2 (juvenile) chromosome region, candidate 11 FAM117B family with sequence P4HB prolyl 4-hydroxylase, similarity 117, member B beta polypeptide CNTF ciliary neurotrophic factor SQSTM1 sequestosome 1 STRADB STE20-related kinase NAIP NLR family, apoptosis adaptor beta inhibitory protein YWHAQ tyrosine 3-SLC33A1 solute carrier family 33 monooxygenase/tryptoph (acetyl-CoA transporter), an 5-monooxygenase member 1 activation protein, theta polypeptide TRAK2 trafficking protein, FIG. 4 FIG. 4 homolog, SAC1 kinesin binding 2 lipid phosphatase domain containing NIF3L1 NIF3 NGG1 interacting INA internexin neuronal factor 3-like 1 intermediate filament protein, alpha PARD3B par-3 partitioning COX8A cytochrome c oxidase defective 3 homolog B subunit VIIIA CDK15 cyclin-dependent kinase HECW1 HECT, C2 and WW 15 domain containing E3 ubiquitin protein ligase 1 NOS1 nitric oxide synthase 1 MET met proto-oncogene SOD2 superoxide dismutase 2, HSPB1 heat shock 27 kDa mitochondrial protein 1 NEFL neurofilament, light CTSB cathepsin B polypeptide ANG angiogenin, HSPA8 heat shock 70 kDa ribonuclease, RNase A protein 8 family, 5 VAPB VAMP (vesicle-ESR1 estrogen receptor 1 associated membrane protein)-associated protein B and C SNCA synuclein, alpha HGF hepatocyte growth factor CAT catalase ACTB actin, beta NEFM neurofilament, medium TH tyrosine hydroxylase polypeptide BCL2 B-cell CLL/lymphoma 2 FAS Fas (TNF receptor superfamily, member 6) CASP3 caspase 3, apoptosis-CLU clusterin related cysteine peptidase SMN1 survival of motor neuron G6PD glucose-6-phosphate 1, telomeric dehydrogenase BAX BCL2-associated X HSF1 heat shock transcription protein factor 1 RNF19A ring finger protein 19A JUN jun oncogene ALS2CR12 amyotrophic lateral HSPA5 heat shock 70 kDa sclerosis 2 (juvenile) protein 5 chromosome region, candidate 12 MAPK14 mitogen-activated protein IL10 interleukin 10 kinase 14 APEX1 APEX nuclease TXNRD1 thioredoxin reductase 1 (multifunctional DNA repair enzyme) 1 NOS2 nitric oxide synthase 2, TIMP1 TIMP metallopeptidase inducible inhibitor 1 CASP9 caspase 9, apoptosis-XIAP X-linked inhibitor of related cysteine apoptosis peptidase GLG1 golgi glycoprotein 1 EPO erythropoietin VEGFA vascular endothelial ELN elastin growth factor A GDNF glial cell derived NFE2L2 nuclear factor (erythroid-neurotrophic factor derived 2)-like 2 SLC6A3 solute carrier family 6 HSPA4 heat shock 70 kDa (neurotransmitter protein 4 transporter, dopamine), member 3 APOE apolipoprotein E PSMB8 proteasome (prosome, macropain) subunit, beta type, 8 DCTN1 dynactin 1 TIMP3 TIMP metallopeptidase inhibitor 3 KIFAP3 kinesin-associated SLC1A1 solute carrier family 1 protein 3 (neuronal/epithelial high affinity glutamate transporter, system Xag), member 1 SMN2 survival of motor neuron CCNC cyclin C 2, centromeric NIPP4 membrane protein, STUB1 STIP1 homology and U-palmitoylated 4 box containing protein 1 ALS2 amyloid beta (A4) PRDX6 peroxiredoxin 6 precursor protein SYP synaptophysin CABIN1 calcineurin binding protein 1 CASP1 caspase 1, apoptosis-GART phosphoribosylglycinami related cysteine de formyltransferase, peptidase phosphoribosylglycinami de synthetase, phosphoribosylaminoimi dazole synthetase CDK5 cyclin-dependent kinase 5 ATXN3 ataxin 3 RTN4 reticulon 4 C1QB complement component 1, q subcomponent, B chain VEGFC nerve growth factor HTT huntingtin receptor PARK7 Parkinson disease 7 XDH xanthine dehydrogenase GFAP glial fibrillary acidic MAP2 microtubule-associated protein protein 2 CYCS cytochrome c, somatic FCGR3B Fc fragment of IgG, low affinity IIIb, CCS copper chaperone for UBL5 ubiquitin-like 5 superoxide dismutase MMP9 matrix metallopeptidase SLC18A3 solute carrier family 18 9 ((vesicular acetylcholine), member 3 TRPM7 transient receptor HSPB2 heat shock 27 kDa potential cation channel, protein 2 subfamily M, member 7 AKT1 v-akt murine thymoma DERL1 Der1-like domain family, viral oncogene homolog 1 member 1 CCL2 chemokine (C-C motif) NGRN neugrin, neurite ligand 2 outgrowth associated GSR glutathione reductase TPPP3 tubulin polymerization-promoting protein family member 3 APAF1 apoptotic peptidase BTBD10 BTB (POZ) domain activating factor 1 containing 10 GLUD1 glutamate CXCR4 chemokine (C-X-C motif) dehydrogenase 1 receptor 4 SLC1A3 solute carrier family 1 FLT1 fms-related tyrosine (glial high affinity glutamate transporter), member 3 kinase 1 PON1 paraoxonase 1 AR androgen receptor LIF leukemia inhibitory factor ERBB3 v-erb-b2 erythroblastic leukemia viral oncogene homolog 3 LGALS1 lectin, galactoside-CD44 CD44 molecule binding, soluble, 1 TP53 tumor protein p53 TLR3 toll-like receptor 3 GRIA1 glutamate receptor, GAPDH glyceraldehyde-3-ionotropic, AMPA 1 phosphate dehydrogenase GRIK1 glutamate receptor, DES desmin ionotropic, kainate 1 CHAT choline acetyltransferase FLT4 fms-related tyrosine kinase 4 CHMP2B chromatin modifying BAG1 BCL2-associated protein 2B athanogene MT3 metallothionein 3 CHRNA4 cholinergic receptor, nicotinic, alpha 4 GSS glutathione synthetase BAK1 BCL2-antagonist/killer 1 KDR kinase insert domain GSTP1 glutathione S-transferase receptor (a type III pi 1 receptor tyrosine kinase) OGG1 8-oxoguanine DNA IL6 interleukin 6 (interferon, glycosylase beta 2).

[1401] The animal or cell may comprise 1, 2, 3, 4, 5, 6, 7, 8, 9, 10 or more disrupted chromosomal sequences encoding a protein associated with ALS and zero, 1, 2, 3, 4, 5, 6, 7, 8, 9, 10 or more chromosomally integrated sequences encoding the disrupted protein associated with ALS. Preferred proteins associated with ALS include SOD1 (superoxide dismutase 1), ALS2 (amyotrophic lateral sclerosis 2), FUS (fused in sarcoma), TARDBP (TAR DNA binding protein), VAGFA (vascular endothelial growth factor A), VAGFB (vascular endothelial growth factor B), and VAGFC (vascular endothelial growth factor C), and any combination thereof.

### Autism

[1402] US Patent Publication No. 20110023145, describes use of zinc finger nucleases to genetically modify cells, animals and proteins associated with autism spectrum disorders (ASD). Autism spectrum disorders (ASDs) are a group of disorders characterized by qualitative impairment in social interaction and communication, and restricted repetitive and stereotyped patterns of behavior, interests, and activities. The three disorders, autism, Asperger syndrome (AS) and pervasive developmental disorder-not otherwise specified (PDD-NOS) are a continuum of the same disorder with varying degrees of severity, associated intellectual functioning and medical conditions. ASDs are predominantly genetically determined disorders with a heritability of around 90%.

[1403] US Patent Publication No. 20110023145 comprises editing of any chromosomal sequences that encode proteins associated with ASD which may be applied to the CRISPR Cas system of the present invention. The proteins associated with ASD are typically selected based on an experimental association of the protein associated with ASD to an incidence or indication of an ASD. For example, the production rate or circulating concentration of a protein associated with ASD may be elevated or depressed in a population having an ASD relative to a population lacking the ASD. Differences in protein levels may be assessed using proteomic techniques including but not limited to Western blot, immunohistochemical staining, enzyme linked immunosorbent assay (ELISA), and mass spectrometry. Alternatively, the proteins associated with ASD may be identified by obtaining gene expression profiles of the genes encoding the proteins using genomic techniques including but not limited to DNA microarray analysis, serial analysis of gene expression (SAGE), and quantitative real-time polymerase chain reaction (Q-PCR).

[1404] Non limiting examples of disease states or disorders that may be associated with proteins associated with ASD include autism, Asperger syndrome (AS), pervasive developmental disorder-not otherwise specified (PDD-NOS), Rett's syndrome, tuberous sclerosis, phenylketonuria, Smith-Lemli-Opitz syndrome and fragile X syndrome. By way of non-limiting example, proteins associated with ASD include but are not limited to the following proteins: ATP10C aminophospholipid-MET MET receptor transporting ATPase tyrosine kinase (ATP10C) BZRAP1 MGLUR5 (GRM5) Metabotropic glutamate receptor 5 (MGLUR5) CDH10 Cadherin-10 MGLUR6 (GRM6) Metabotropic glutamate receptor 6 (MGLUR6) CDH9 Cadherin-9 NLGN1 Neuroligin-1 CNTN4 Contactin-4 NLGN2 Neuroligin-2 CNTNAP2 Contactin-associated SEMA5A Neuroligin-3 protein-like 2 (CNTNAP2) DHCR7 7-dehydrocholesterol NLGN4X Neuroligin-4 X-reductase (DHCR7) linked DOC2A Double C2-like domain-NLGN4Y Neuroligin-4 Y-containing protein alpha linked DPP6 Dipeptidyl NLGN5 Neuroligin-5 aminopeptidase-like protein 6 EN2 engrailed 2 (EN2) NRCAM Neuronal cell adhesion molecule (NRCAM) MDGA2 fragile X mental retardation NRXN1 Neurexin-1 1 (MDGA2) FMR2 (AFF2) AF4/FMR2 family member 2 OR4M2 Olfactory receptor (AFF2) 4M2 FOXP2 Forkhead box protein P2 OR4N4 Olfactory receptor (FOXP2) 4N4 FXR1 Fragile X mental OXTR oxytocin receptor retardation, autosomal (OXTR) homolog 1 (FXR1) FXR2 Fragile X mental PAH phenylalanine retardation, autosomal hydroxylase (PAH) homolog 2 (FXR2) GABRA1 Gamma-aminobutyric acid PTEN Phosphatase and receptor subunit alpha-1 tensin homologue (GABRA1) (PTEN) GABRA5 GABAA (.gamma.-aminobutyric PTPRZ1 Receptor-type acid) receptor alpha 5 tyrosine-protein subunit (GABRA5) phosphatase zeta (PTPRZ1) GABRB1 Gamma-aminobutyric acid RELN Reelin receptor subunit beta-1 (GABRB1) GABRB3 GABAA (.gamma.-aminobutyric RPL10 60S ribosomal acid) receptor .beta.3 subunit protein L10 (GABRB3) GABRG1 Gamma-aminobutyric acid SEMA5A Semaphorin-5A receptor subunit gamma-1 (SEMA5A) (GABRG1) HIRIP3 HIRA-interacting protein 3 SEZ6L2 seizure related 6 homolog (mouse)-like 2 HOXA1 Homeobox protein Hox-A1 SHANK3 SH3 and multiple (HOXA1) ankyrin repeat domains 3 (SHANK3) IL6 Interleukin-6 SHBZRAP1 SH3 and multiple ankyrin repeat domains 3 (SHBZRAP1) LAMB1 Laminin subunit beta-1 SLC6A4 Serotonin (LAMB1) transporter (SERT) MAPK3 Mitogen-activated protein TAS2R1 Taste receptor kinase 3 type 2 member 1 TAS2R1 MAZ Myc-associated zinc finger TSC1 Tuberous sclerosis protein protein 1 MDGA2 MAM domain containing TSC2 Tuberous sclerosis glycosylphosphatidylinositol protein 2 anchor 2 (MDGA2) MECP2 Methyl CpG binding UBE3A Ubiquitin protein protein 2 (MECP2) ligase E3A (UBE3A) MECP2 methyl CpG binding WNT2 Wingless-type protein 2 (MECP2) MMTV integration site family, member 2 (WNT2)

[1405] The identity of the protein associated with ASD whose chromosomal sequence is edited can and will vary. In preferred embodiments, the proteins associated with ASD whose chromosomal sequence is edited may be the benzodiazapine receptor (peripheral) associated protein 1 (BZRAP1) encoded by the BZRAP1 gene, the AF4/FMR2 family member 2 protein (AFF2) encoded by the AFF2 gene (also termed MFR2), the fragile X mental retardation autosomal homolog 1 protein (FXR1) encoded by the FXR1 gene, the fragile X mental retardation autosomal homolog 2 protein (FXR2) encoded by the FXR2 gene, the MAM domain containing glycosylphosphatidylinositol anchor 2 protein (MDGA2) encoded by the MDGA2 gene, the methyl CpG binding protein 2 (MECP2) encoded by the MECP2 gene, the metabotropic glutamate receptor 5 (MGLUR5) encoded by the MGLUR5-1 gene (also termed GRM5), the neurexin 1 protein encoded by the NRXN1 gene, or the semaphorin-5A protein (SEMA5A) encoded by the SEMA5A gene. In an exemplary embodiment, the genetically modified animal is a rat, and the edited chromosomal sequence encoding the protein associated with ASD is as listed below: BZRAP1 benzodiazapine receptor XM_002727789, (peripheral) associated XM_213427, protein 1 (BZRAP1) XM_002724533, XM_001081125 AFF2 (FMR2) AF4/FMR2 family member 2 XM_219832, (AFF2) XM_001054673 FXR1 Fragile X mental NM_001012179 retardation, autosomal homolog 1 (FXR1) FXR2 Fragile X mental NM_001100647 retardation, autosomal homolog 2 (FXR2) MDGA2 MAM domain containing NM_199269 glycosylphosphatidylinositol anchor 2 (MDGA2) MECP2 Methyl CpG binding NM_022673 protein 2 (MECP2) MGLUR5 Metabotropic glutamate NM_017012 (GRM5) receptor 5 (MGLUR5) NRXN1 Neurexin-1 NM_021767 SEMA5A Semaphorin-5A (SEMA5A) NM_001107659.

### Trinucleotide Repeat Expansion Disorders

[1406] US Patent Publication No. 20110016540, describes use of zinc finger nucleases to genetically modify cells, animals and proteins associated with trinucleotide repeat expansion disorders. Trinucleotide repeat expansion disorders are complex, progressive disorders that involve developmental neurobiology and often affect cognition as well as sensori-motor functions.

[1407] Trinucleotide repeat expansion proteins are a diverse set of proteins associated with susceptibility for developing a trinucleotide repeat expansion disorder, the presence of a trinucleotide repeat expansion disorder, the severity of a trinucleotide repeat expansion disorder or any combination thereof. Trinucleotide repeat expansion disorders are divided into two categories determined by the type of repeat. The most common repeat is the triplet CAG, which, when present in the coding region of a gene, codes for the amino acid glutamine (Q). Therefore, these disorders are referred to as the polyglutamine (polyQ) disorders and comprise the following diseases: Huntington Disease (HD); Spinobulbar Muscular Atrophy (SBMA); Spinocerebellar Ataxias (SCA types 1, 2, 3, 6, 7, and 17); and Dentatorubro-Pallidoluysian Atrophy (DRPLA). The remaining trinucleotide repeat expansion disorders either do not involve the CAG triplet or the CAG triplet is not in the coding region of the gene and are, therefore, referred to as the non-polyglutamine disorders. The non-polyglutamine disorders comprise Fragile X Syndrome (FRAXA); Fragile XE Mental Retardation (FRAXE); Friedreich Ataxia (FRDA); Myotonic Dystrophy (DM); and Spinocerebellar Ataxias (SCA types 8, and 12).

[1408] The proteins associated with trinucleotide repeat expansion disorders are typically selected based on an experimental association of the protein associated with a trinucleotide repeat expansion disorder to a trinucleotide repeat expansion disorder. For example, the production rate or circulating concentration of a protein associated with a trinucleotide repeat expansion disorder may be elevated or depressed in a population having a trinucleotide repeat expansion disorder relative to a population lacking the trinucleotide repeat expansion disorder. Differences in protein levels may be assessed using proteomic techniques including but not limited to Western blot, immunohistochemical staining, enzyme linked immunosorbent assay (ELISA), and mass spectrometry. Alternatively, the proteins associated with trinucleotide repeat expansion disorders may be identified by obtaining gene expression profiles of the genes encoding the proteins using genomic techniques including but not limited to DNA microarray analysis, serial analysis of gene expression (SAGE), and quantitative real-time polymerase chain reaction (Q-PCR).

[1409] Non-limiting examples of proteins associated with trinucleotide repeat expansion disorders include AR (androgen receptor), FMR1 (fragile X mental retardation 1), HTT (huntingtin), DMPK (dystrophia myotonica-protein kinase), FXN (frataxin), ATXN2 (ataxin 2), ATN1 (atrophin 1), FEN1 (flap structure-specific endonuclease 1), TNRC6A (trinucleotide repeat containing 6A), PABPN1 (poly(A) binding protein, nuclear 1), JPH3 (junctophilin 3), MED15 (mediator complex subunit 15), ATXN1 (ataxin 1), ATXN3 (ataxin 3), TBP (TATA box binding protein), CACNA1A (calcium channel, voltage-dependent, P/Q type, alpha 1A subunit), ATXN80S (ATXN8 opposite strand (non-protein coding)), PPP2R2B (protein phosphatase 2, regulatory subunit B, beta), ATXN7 (ataxin 7), TNRC6B (trinucleotide repeat containing 6B), TNRC6C (trinucleotide repeat containing 6C), CELF3 (CUGBP, Elav-like family member 3), MAB21L1 (mab-21-like 1 (C. elegans)), MSH2 (mutS homolog 2, colon cancer, nonpolyposis type 1 (E. coli)), TMEM185A (transmembrane protein 185A), SIX5 (SIX homeobox 5), CNPY3 (canopy 3 homolog (zebrafish)), FRAXE (fragile site, folic acid type, rare, fra(X)(q28) E), GNB2 (guanine nucleotide binding protein (G protein), beta polypeptide 2), RPL14 (ribosomal protein L14), ATXN8 (ataxin 8), INSR (insulin receptor), TTR (transthyretin), EP400 (El A binding protein p400), GIGYF2 (GRB10 interacting GYF protein 2), OGG1 (8-oxoguanine DNA glycosylase), STC1 (stanniocalcin 1), CNDP1 (carnosine dipeptidase 1 (metallopeptidase M20 family)), ClOorf2 (chromosome 10 open reading frame 2), MAML3 mastermind-like 3 (Drosophila), DKC1 (dyskeratosis congenita 1, dyskerin), PAXIP1 (PAX interacting (with transcription-activation domain) protein 1), CASK (calcium/calmodulin-dependent serine protein kinase (MAGUK family)), MAPT (microtubule-associated protein tau), SP1 (Spl transcription factor), POLG (polymerase (DNA directed), gamma), AFF2 (AF4/FMR2 family, member 2), THBS1 (thrombospondin 1), TP53 (tumor protein p53), ESR1 (estrogen receptor 1), CGGBP1 (CGG triplet repeat binding protein 1), ABT1 (activator of basal transcription 1), KLK3 (kallikrein-related peptidase 3), PRNP (prion protein), JUN (jun oncogene), KCNN3 (potassium intermediate/small conductance calcium-activated channel, subfamily N, member 3), BAX (BCL2-associated X protein), FRAXA (fragile site, folic acid type, rare, fra(X)(q27.3) A (macroorchidism, mental retardation)), KBTBD10 (kelch repeat and BTB (POZ) domain containing 10), MBNL1 (muscleblind-like (Drosophila)), RAD51 (RAD51 homolog (RecA homolog, E. coli) (S. cerevisiae)), NCOA3 (nuclear receptor coactivator 3), ERDA1 (expanded repeat domain, CAG/CTG 1), TSC1 (tuberous sclerosis 1), COMP (cartilage oligomeric matrix protein), GCLC (glutamate-cysteine ligase, catalytic subunit), RRAD (Ras-related associated with diabetes), MSH3 (mutS homolog 3 (E. coli)), DRD2 (dopamine receptor D2), CD44 (CD44 molecule (Indian blood group)), CTCF (CCCTC-binding factor (zinc finger protein)), CCND1 (cyclin D1), CLSPN (claspin homolog (Xenopus laevis)), MEF2A (myocyte enhancer factor 2A), PTPRU (protein tyrosine phosphatase, receptor type, U), GAPDH (glyceraldehyde-3-phosphate dehydrogenase), TRIM22 (tripartite motif-containing 22), WT1 (Wilms tumor 1), AHR (aryl hydrocarbon receptor), GPX1 (glutathione peroxidase 1), TPMT (thiopurine S-methyltransferase), NDP (Norrie disease (pseudoglioma)), ARX (aristaless related homeobox), MUS81 (MUS81 endonuclease homolog (S. cerevisiae)), TYR (tyrosinase (oculocutaneous albinism IA)), EGR1 (early growth response 1), UNG (uracil-DNA glycosylase), NUMBL (numb homolog (Drosophila)-like), FABP2 (fatty acid binding protein 2, intestinal), EN2 (engrailed homeobox 2), CRYGC (crystallin, gamma C), SRP14 (signal recognition particle 14 kDa (homologous Alu RNA binding protein)), CRYGB (crystallin, gamma B), PDCD1 (programmed cell death 1), HOXA1 (homeobox A1), ATXN2L (ataxin 2-like), PMS2 (PMS2 postmeiotic segregation increased 2 (S. cerevisiae)), GLA (galactosidase, alpha), CBL (Cas-Br-M (murine) ecotropic retroviral transforming sequence), FTH1 (ferritin, heavy polypeptide 1), IL12RB2 (interleukin 12 receptor, beta 2), OTX2 (orthodenticle homeobox 2), HOXA5 (homeobox A5), POLG2 (polymerase (DNA directed), gamma 2, accessory subunit), DLX2 (distal-less homeobox 2), SIRPA (signal-regulatory protein alpha), OTX1 (orthodenticle homeobox 1), AHRR (aryl-hydrocarbon receptor repressor), MANF (mesencephalic astrocyte-derived neurotrophic factor), TMEM158 (transmembrane protein 158 (gene/pseudogene)), and ENSG00000078687.

[1410] Preferred proteins associated with trinucleotide repeat expansion disorders include HTT (Huntingtin), AR (androgen receptor), FXN (frataxin), Atxn3 (ataxin), Atxn1 (ataxin), Atxn2 (ataxin), Atxn7 (ataxin), Atxn10 (ataxin), DMPK (dystrophia myotonica-protein kinase), Atn1 (atrophin 1), CBP (creb binding protein), VLDLR (very low density lipoprotein receptor), and any combination thereof.

### Treating Hearing Diseases

[1411] The present invention also contemplates delivering the CRISPR-Cas system to one or both ears.

[1412] Researchers are looking into whether gene therapy could be used to aid current deafness treatments—namely, cochlear implants. Deafness is often caused by lost or damaged hair cells that cannot relay signals to auditory neurons. In such cases, cochlear implants may be used to respond to sound and transmit electrical signals to the nerve cells. But these neurons often degenerate and retract from the cochlea as fewer growth factors are released by impaired hair cells.

[1413] US patent application 20120328580 describes injection of a pharmaceutical composition into the ear (e.g., auricular administration), such as into the luminae of the cochlea (e.g., the Scala media, Sc vestibulae, and Sc tympani), e.g., using a syringe, e.g., a single-dose syringe. For example, one or more of the compounds described herein can be administered by intratympanic injection (e.g., into the middle ear), and/or injections into the outer, middle, and/or inner ear. Such methods are routinely used in the art, for example, for the administration of steroids and antibiotics into human ears. Injection can be, for example, through the round window of the ear or through the cochlear capsule. Other inner ear administration methods are known in the art (see, e.g., Salt and Plontke, Drug Discovery Today, 10:1299-1306, 2005).

[1414] In another mode of administration, the pharmaceutical composition can be administered in situ, via a catheter or pump. A catheter or pump can, for example, direct a pharmaceutical composition into the cochlear luminae or the round window of the ear and/or the lumen of the colon. Exemplary drug delivery apparatus and methods suitable for administering one or more of the compounds described herein into an ear, e.g., a human ear, are described by McKenna et al., (U.S. Publication No. 2006/0030837) and Jacobsen et al., (U.S. Pat. No. 7,206,639). In some embodiments, a catheter or pump can be positioned, e.g., in the ear (e.g., the outer, middle, and/or inner ear) of a patient during a surgical procedure. In some embodiments, a catheter or pump can be positioned, e.g., in the ear (e.g., the outer, middle, and/or inner ear) of a patient without the need for a surgical procedure.

[1415] Alternatively or in addition, one or more of the compounds described herein can be administered in combination with a mechanical device such as a cochlear implant or a hearing aid, which is worn in the outer ear. An exemplary cochlear implant that is suitable for use with the present invention is described by Edge et al., (U.S. Publication No. 2007/0093878).

[1416] In some embodiments, the modes of administration described above may be combined in any order and can be simultaneous or interspersed.

[1417] Alternatively or in addition, the present invention may be administered according to any of the Food and Drug Administration approved methods, for example, as described in CDER Data Standards Manual, version number 004 (which is available at fda.give/cder/dsm/DRG/drg00301.htm).

[1418] In general, the cell therapy methods described in US patent application 20120328580 can be used to promote complete or partial differentiation of a cell to or towards a mature cell type of the inner ear (e.g., a hair cell) in vitro. Cells resulting from such methods can then be transplanted or implanted into a patient in need of such treatment. The cell culture methods required to practice these methods, including methods for identifying and selecting suitable cell types, methods for promoting complete or partial differentiation of selected cells, methods for identifying complete or partially differentiated cell types, and methods for implanting complete or partially differentiated cells are described below.

[1419] Cells suitable for use in the present invention include, but are not limited to, cells that are capable of differentiating completely or partially into a mature cell of the inner ear, e.g., a hair cell (e.g., an inner and/or outer hair cell), when contacted, e.g., in vitro, with one or more of the compounds described herein. Exemplary cells that are capable of differentiating into a hair cell include, but are not limited to stem cells (e.g., inner ear stem cells, adult stem cells, bone marrow derived stem cells, embryonic stem cells, mesenchymal stem cells, skin stem cells, iPS cells, and fat derived stem cells), progenitor cells (e.g., inner ear progenitor cells), support cells (e.g., Deiters' cells, pillar cells, inner phalangeal cells, tectal cells and Hensen's cells), and/or germ cells. The use of stem cells for the replacement of inner ear sensory cells is described in Li et al., (U.S. Publication No. 2005/0287127) and Li et al., (U.S. patent Ser. No. 11/953,797). The use of bone marrow derived stem cells for the replacement of inner ear sensory cells is described in Edge et al., PCT/US2007/084654. iPS cells are described, e.g., at Takahashi et al., Cell, Volume 131, Issue 5, Pages 861-872 (2007); Takahashi and Yamanaka, Cell 126, 663-76 (2006); Okita et al., Nature 448, 260-262 (2007); Yu, J. et al., Science 318(5858):1917-1920 (2007); Nakagawa et al., Nat. Biotechnol. 26:101-106 (2008); and Zaehres and Scholer, Cell 131(5):834-835 (2007). Such suitable cells can be identified by analyzing (e.g., qualitatively or quantitatively) the presence of one or more tissue specific genes. For example, gene expression can be detected by detecting the protein product of one or more tissue-specific genes. Protein detection techniques involve staining proteins (e.g., using cell extracts or whole cells) using antibodies against the appropriate antigen. In this case, the appropriate antigen is the protein product of the tissue-specific gene expression. Although, in principle, a first antibody (i.e., the antibody that binds the antigen) can be labeled, it is more common (and improves the visualization) to use a second antibody directed against the first (e.g., an anti-IgG). This second antibody is conjugated either with fluorochromes, or appropriate enzymes for colorimetric reactions, or gold beads (for electron microscopy), or with the biotin-avidin system, so that the location of the primary antibody, and thus the antigen, can be recognized.

[1420] The CRISPR Cas molecules of the present invention may be delivered to the ear by direct application of pharmaceutical composition to the outer ear, with compositions modified from US Published application, 20110142917. In some embodiments the pharmaceutical composition is applied to the ear canal. Delivery to the ear may also be referred to as aural or otic delivery.

[1421] In some embodiments the RNA molecules of the invention are delivered in liposome or lipofectin formulations and the like and can be prepared by methods well known to those skilled in the art. Such methods are described, for example, in U.S. Pat. Nos. 5,593,972, 5,589,466, and 5,580,859, which are herein incorporated by reference.

[1422] Delivery systems aimed specifically at the enhanced and improved delivery of siRNA into mammalian cells have been developed, (see, for example, Shen et al FEBS Let. 2003, 539:111-114; Xia et al., Nat. Biotech. 2002, 20:1006-1010; Reich et al., Mol. Vision. 2003, 9: 210-216; Sorensen et al., J. Mol. Biol. 2003, 327: 761-766; Lewis et al., Nat. Gen. 2002, 32: 107-108 and Simeoni et al., NAR 2003, 31, 11: 2717-2724) and may be applied to the present invention. siRNA has recently been successfully used for inhibition of gene expression in primates (see for example. Tolentino et al., Retina 24(4):660 which may also be applied to the present invention.

[1423] Qi et al. discloses methods for efficient siRNA transfection to the inner ear through the intact round window by a novel proteidic delivery technology which may be applied to the nucleic acid-targeting system of the present invention (see, e.g., Qi et al., Gene Therapy (2013), 1-9). In particular, a TAT double stranded RNA-binding domains (TAT-DRBDs), which can transfect Cy3-labeled siRNA into cells of the inner ear, including the inner and outer hair cells, crista ampullaris, macula utriculi and macula sacculi, through intact round-window permeation was successful for delivering double stranded siRNAs in vivo for treating various inner ear ailments and preservation of hearing function. About 40 μl of 10 mM RNA may be contemplated as the dosage for administration to the ear.

[1424] According to Rejali et al. (Hear Res. 2007 June; 228(1-2):180-7), cochlear implant function can be improved by good preservation of the spiral ganglion neurons, which are the target of electrical stimulation by the implant and brain derived neurotrophic factor (BDNF) has previously been shown to enhance spiral ganglion survival in experimentally deafened ears. Rejali et al. tested a modified design of the cochlear implant electrode that includes a coating of fibroblast cells transduced by a viral vector with a BDNF gene insert. To accomplish this type of ex vivo gene transfer, Rejali et al. transduced guinea pig fibroblasts with an adenovirus with a BDNF gene cassette insert, and determined that these cells secreted BDNF and then attached BDNF-secreting cells to the cochlear implant electrode via an agarose gel, and implanted the electrode in the scala tympani. Rejali et al. determined that the BDNF expressing electrodes were able to preserve significantly more spiral ganglion neurons in the basal turns of the cochlea after 48 days of implantation when compared to control electrodes and demonstrated the feasibility of combining cochlear implant therapy with ex vivo gene transfer for enhancing spiral ganglion neuron survival. Such a system may be applied to the nucleic acid-targeting system of the present invention for delivery to the ear.

[1425] Mukherjea et al. (Antioxidants & Redox Signaling, Volume 13, Number 5, 2010) document that knockdown of NOX3 using short interfering (si) RNA abrogated cisplatin ototoxicity, as evidenced by protection of OHCs from damage and reduced threshold shifts in auditory brainstem responses (ABRs). Different doses of siNOX3 (0.3, 0.6, and 0.9 μg) were administered to rats and NOX3 expression was evaluated by real time RT-PCR. The lowest dose of NOX3 siRNA used (0.3 μg) did not show any inhibition of NOX3 mRNA when compared to transtympanic administration of scrambled siRNA or untreated cochleae. However, administration of the higher doses of NOX3 siRNA (0.6 and 0.9 μg) reduced NOX3 expression compared to control scrambled siRNA. Such a system may be applied to the CRISPR Cas system of the present invention for transtympanic administration with a dosage of about 2 mg to about 4 mg of CRISPR Cas for administration to a human.

[1426] Jung et al. (Molecular Therapy, vol. 21 no. 4, 834-841 April 2013) demonstrate that Hes5 levels in the utricle decreased after the application of siRNA and that the number of hair cells in these utricles was significantly larger than following control treatment. The data suggest that siRNA technology may be useful for inducing repair and regeneration in the inner ear and that the Notch signaling pathway is a potentially useful target for specific gene expression inhibition. Jung et al. injected 8 μg of Hes5 siRNA in 2 μl volume, prepared by adding sterile normal saline to the lyophilized siRNA to a vestibular epithelium of the ear. Such a system may be applied to the nucleic acid-targeting system of the present invention for administration to the vestibular epithelium of the ear with a dosage of about 1 to about 30 mg of CRISPR Cas for administration to a human.

### Gene Targeting in Non-Dividing Cells (Neurones & Muscle)

[1427] Non-dividing (especially non-dividing, fully differentiated) cell types present issues for gene targeting or genome engineering, for example because homologous recombination (HR) is generally suppressed in the G1 cell-cycle phase. However, while studying the mechanisms by which cells control normal DNA repair systems, Durocher discovered a previously unknown switch that keeps HR “off” in non-dividing cells and devised a strategy to toggle this switch back on. Orthwein et al. (Daniel Durocher's lab at the Mount Sinai Hospital in Ottawa, Canada) recently reported (Nature 16142, published online 9 Dec. 2015) have shown that the suppression of HR can be lifted and gene targeting successfully concluded in both kidney (293T) and osteosarcoma (U20S) cells. Tumor suppressors, BRCA1, PALB2 and BRAC2 are known to promote DNA DSB repair by HR. They found that formation of a complex of BRCA1 with PALB2-BRAC2 is governed by a ubiquitin site on PALB2, such that action on the site by an E3 ubiquitin ligase. This E3 ubiquitin ligase is composed of KEAP1 (a PALB2-interacting protein) in complex with cullin-3 (CUL3)-RBX1. PALB2 ubiquitylation suppresses its interaction with BRCA1 and is counteracted by the deubiquitylase USP11, which is itself under cell cycle control. Restoration of the BRCA1-PALB2 interaction combined with the activation of DNA-end resection is sufficient to induce homologous recombination in G1, as measured by a number of methods including a CRISPR-Cas9-based gene-targeting assay directed at USP11 or KEAP1 (expressed from a pX459 vector). However, when the BRCA1-PALB2 interaction was restored in resection-competent G1 cells using either KEAP1 depletion or expression of the PALB2-KR mutant, a robust increase in gene-targeting events was detected.

[1428] Thus, reactivation of HR in cells, especially non-dividing, fully differentiated cell types is preferred, in some embodiments. In some embodiments, promotion of the BRCA1-PALB2 interaction is preferred in some embodiments. In some embodiments, the target cell is a non-dividing cell. In some embodiments, the target cell is a neurone or muscle cell. In some embodiments, the target cell is targeted in vivo. In some embodiments, the cell is in G1 and HR is suppressed. In some embodiments, use of KEAP1 depletion, for example inhibition of expression of KEAP1 activity, is preferred. KEAP1 depletion may be achieved through siRNA, for example as shown in Orthwein et al. Alternatively, expression of the PALB2-KR mutant (lacking all eight Lys residues in the BRCA1-interaction domain is preferred, either in combination with KEAP1 depletion or alone. PALB2-KR interacts with BRCA1 irrespective of cell cycle position. Thus, promotion or restoration of the BRCA1-PALB2 interaction, especially in G1 cells, is preferred in some embodiments, especially where the target cells are non-dividing, or where removal and return (ex vivo gene targeting) is problematic, for example neurone or muscle cells. KEAP1 siRNA is available from ThermoFischer. In some embodiments, a BRCA1-PALB2 complex may be delivered to the G1 cell. In some embodiments, PALB2 deubiquitylation may be promoted for example by increased expression of the deubiquitylase USP11, so it is envisaged that a construct may be provided to promote or up-regulate expression or activity of the deubiquitylase USP11.

### Treating Diseases of the Eye

[1429] The present invention also contemplates delivering the CRISPR-Cas system to one or both eyes.

[1430] In yet another aspect of the invention, the CRISPR-Cas system may be used to correct ocular defects that arise from several genetic mutations further described in Genetic Diseases of the Eye, Second Edition, edited by Elias I. Traboulsi, Oxford University Press, 2012.

[1431] For administration to the eye, lentiviral vectors, in particular equine infectious anemia viruses (EIAV) are particularly preferred.

[1432] In another embodiment, minimal non-primate lentiviral vectors based on the equine infectious anemia virus (EIAV) are also contemplated, especially for ocular gene therapy (see, e.g., Balagaan, J Gene Med 2006; 8: 275-285, Published online 21 Nov. 2005 in Wiley InterScience (www.interscience.wiley.com). DOI: 10.1002/jgm.845). The vectors are contemplated to have cytomegalovirus (CMV) promoter driving expression of the target gene. Intracameral, subretinal, intraocular and intravitreal injections are all contemplated (see, e.g., Balagaan, J Gene Med 2006; 8: 275-285, Published online 21 Nov. 2005 in Wiley InterScience (www.interscience.wiley.com). DOI: 10.1002/jgm.845). Intraocular injections may be performed with the aid of an operating microscope. For subretinal and intravitreal injections, eyes may be prolapsed by gentle digital pressure and fundi visualised using a contact lens system consisting of a drop of a coupling medium solution on the cornea covered with a glass microscope slide coverslip. For subretinal injections, the tip of a 10-mm 34-gauge needle, mounted on a 5-μl Hamilton syringe may be advanced under direct visualisation through the superior equatorial sclera tangentially towards the posterior pole until the aperture of the needle was visible in the subretinal space. Then, 2 μl of vector suspension may be injected to produce a superior bullous retinal detachment, thus confirming subretinal vector administration. This approach creates a self-sealing sclerotomy allowing the vector suspension to be retained in the subretinal space until it is absorbed by the RPE, usually within 48 h of the procedure. This procedure may be repeated in the inferior hemisphere to produce an inferior retinal detachment. This technique results in the exposure of approximately 70% of neurosensory retina and RPE to the vector suspension. For intravitreal injections, the needle tip may be advanced through the sclera 1 mm posterior to the corneoscleral limbus and 2 μl of vector suspension injected into the vitreous cavity. For intracameral injections, the needle tip may be advanced through a corneoscleral limbal paracentesis, directed towards the central cornea, and 2 μl of vector suspension may be injected. For intracameral injections, the needle tip may be advanced through a corneoscleral limbal paracentesis, directed towards the central cornea, and 2 μl of vector suspension may be injected. These vectors may be injected at titres of either 1.0-1.4×10¹⁰ or 1.0-1.4×10⁹ transducing units (TU)/ml.

[1433] In another embodiment, RetinoStat®, an equine infectious anemia virus-based lentiviral gene therapy vector that expresses angiostatic proteins endostain and angiostatin that is delivered via a subretinal injection for the treatment of the web form of age-related macular degeneration is also contemplated (see, e.g., Binley et al., HUMAN GENE THERAPY 23:980-991 (September 2012)). Such a vector may be modified for the CRISPR-Cas system of the present invention. Each eye may be treated with either RetinoStat® at a dose of 1.1×10⁵ transducing units per eye (TU/eye) in a total volume of 100 μl.

[1434] In another embodiment, an E1-, partial E3-, E4-deleted adenoviral vector may be contemplated for delivery to the eye. Twenty-eight patients with advanced neovascular aggregated macular degeneration (AMD) were given a single intravitreous injection of an E1-, partial E3-, E4-deleted adenoviral vector expressing human pigment epithelium-derived factor (AdPEDF.ll) (see, e.g., Campochiaro et al., Human Gene Therapy 17:167-176 (February 2006)). Doses ranging from 10⁶ to 10^{9.5} particle units (PU) were investigated and there were no serious adverse events related to AdPEDF.ll and no dose-limiting toxicities (see, e.g., Campochiaro et al., Human Gene Therapy 17:167-176 (February 2006)). Adenoviral vectormediated ocular gene transfer appears to be a viable approach for the treatment of ocular disorders and could be applied to the CRISPR Cas system.

[1435] In another embodiment, the sd-rxRNA® system of RXi Pharmaceuticals may be used/and or adapted for delivering CRISPR Cas to the eye. In this system, a single intravitreal administration of 3 μg of sd-rxRNA results in sequence-specific reduction of PPIB mRNA levels for 14 days. The sd-rxRNA® system may be applied to the nucleic acid-targeting system of the present invention, contemplating a dose of about 3 to 20 mg of CRISPR administered to a human.

[1436] Millington-Ward et al. (Molecular Therapy, vol. 19 no. 4, 642-649 April 2011) describes adeno-associated virus (AAV) vectors to deliver an RNA interference (RNAi)-based rhodopsin suppressor and a codon-modified rhodopsin replacement gene resistant to suppression due to nucleotide alterations at degenerate positions over the RNAi target site. An injection of either 6.0×10⁸ vp or 1.8×10¹⁰ vp AAV were subretinally injected into the eyes by Millington-Ward et al. The AAV vectors of Millington-Ward et al. may be applied to the CRISPR Cas system of the present invention, contemplating a dose of about 2×10¹¹ to about 6×10¹³ vp administered to a human.

[1437] Dalkara et al. (Sci Transl Med 5, 189ra76 (2013)) also relates to in vivo directed evolution to fashion an AAV vector that delivers wild-type versions of defective genes throughout the retina after noninjurious injection into the eyes' vitreous humor. Dalkara describes a 7mer peptide display library and an AAV library constructed by DNA shuffling of cap genes from AAV1, 2, 4, 5, 6, 8, and 9. The rcAAV libraries and rAAV vectors expressing GFP under a CAG or Rho promoter were packaged and deoxyribonuclease-resistant genomic titers were obtained through quantitative PCR. The libraries were pooled, and two rounds of evolution were performed, each consisting of initial library diversification followed by three in vivo selection steps. In each such step, P30 rho-GFP mice were intravitreally injected with 2 ml of iodixanol-purified, phosphate-buffered saline (PBS)-dialyzed library with a genomic titer of about 1×10¹² vg/ml. The AAV vectors of Dalkara et al. may be applied to the nucleic acid-targeting system of the present invention, contemplating a dose of about 1×10¹⁵ to about 1×10¹⁶ vg/ml administered to a human.

[1438] In another embodiment, the rhodopsin gene may be targeted for the treatment of retinitis pigmentosa (RP), wherein the system of US Patent Publication No. 20120204282 assigned to Sangamo BioSciences, Inc. may be modified in accordance of the CRISPR Cas system of the present invention.

[1439] In another embodiment, the methods of US Patent Publication No. 20130183282 assigned to Cellectis, which is directed to methods of cleaving a target sequence from the human rhodopsin gene, may also be modified to the nucleic acid-targeting system of the present invention.

[1440] US Patent Publication No. 20130202678 assigned to Academia Sinica relates to methods for treating retinopathies and sight-threatening ophthalmologic disorders relating to delivering of the Puf-A gene (which is expressed in retinal ganglion and pigmented cells of eye tissues and displays a unique anti-apoptotic activity) to the subretinal or intravitreal space in the eye. In particular, desirable targets are zgc:193933, prdm1a, spata2, tex10, rbb4, ddx3, zp2.2, Blimp-1 and HtrA2, all of which may be targeted by the nucleic acid-targeting system of the present invention.

[1441] Wu (Cell Stem Cell, 13:659-62, 2013) designed a guide RNA that led Cas9 to a single base pair mutation that causes cataracts in mice, where it induced DNA cleavage. Then using either the other wild-type allele or oligos given to the zygotes repair mechanisms corrected the sequence of the broken allele and corrected the cataract-causing genetic defect in mutant mouse.

[1442] US Patent Publication No. 20120159653, describes use of zinc finger nucleases to genetically modify cells, animals and proteins associated with macular degeneration (MD). Macular degeneration (MD) is the primary cause of visual impairment in the elderly, but is also a hallmark symptom of childhood diseases such as Stargardt disease, Sorsby fundus, and fatal childhood neurodegenerative diseases, with an age of onset as young as infancy. Macular degeneration results in a loss of vision in the center of the visual field (the macula) because of damage to the retina. Currently existing animal models do not recapitulate major hallmarks of the disease as it is observed in humans. The available animal models comprising mutant genes encoding proteins associated with MD also produce highly variable phenotypes, making translations to human disease and therapy development problematic.

[1443] One aspect of US Patent Publication No. 20120159653 relates to editing of any chromosomal sequences that encode proteins associated with MD which may be applied to the nucleic acid-targeting system of the present invention. The proteins associated with MD are typically selected based on an experimental association of the protein associated with MD to an MD disorder. For example, the production rate or circulating concentration of a protein associated with MD may be elevated or depressed in a population having an MD disorder relative to a population lacking the MD disorder. Differences in protein levels may be assessed using proteomic techniques including but not limited to Western blot, immunohistochemical staining, enzyme linked immunosorbent assay (ELISA), and mass spectrometry. Alternatively, the proteins associated with MD may be identified by obtaining gene expression profiles of the genes encoding the proteins using genomic techniques including but not limited to DNA microarray analysis, serial analysis of gene expression (SAGE), and quantitative real-time polymerase chain reaction (Q-PCR).

[1444] By way of non-limiting example, proteins associated with MD include but are not limited to the following proteins: (ABCA4) ATP-binding cassette, sub-family A (ABC1), member 4 ACHM1 achromatopsia (rod monochromacy) 1 ApoE Apolipoprotein E (ApoE) C1QTNF5 (CTRP5) C1q and tumor necrosis factor related protein 5 (C1QTNF5) C2 Complement component 2 (C2) C3 Complement components (C3) CCL2 Chemokine (C-C motif) Ligand 2 (CCL2) CCR2 Chemokine (C-C motif) receptor 2 (CCR2) CD36 Cluster of Differentiation 36 CFB Complement factor B CFH Complement factor CFH H CFHR1 complement factor H-related 1 CFHR3 complement factor H-related 3 CNGB3 cyclic nucleotide gated channel beta 3 CP ceruloplasmin (CP) CRP C reactive protein (CRP) CST3 cystatin C or cystatin 3 (CST3) CTSD Cathepsin D (CTSD) CX3CR1 chemokine (C-X3-C motif) receptor 1 ELOVL4 Elongation of very long chain fatty acids 4 ERCC6 excision repair crosscomplementing rodent repair deficiency, complementation group 6 FBLN5 Fibulin-5 FBLN5 Fibulin 5 FBLN6 Fibulin 6 FSCN2 fascin (FSCN2) HMCN1 Hemicentrin 1 HMCN1 hemicentin 1 HTRA1 HtrA serine peptidase 1 (HTRA1) HTRA1 HtrA serine peptidase 1 IL-6 Interleukin 6 IL-8 Interleukin 8 LOC387715 Hypothetical protein PLEKHA1 Pleckstrin homology domaincontaining family A member 1 (PLEKHA1) PROM1 Prominin 1 (PROM1 or CD133) PRPH2 Peripherin-2 RPGR retinitis pigmentosa GTPase regulator SERPING1 serpin peptidase inhibitor, clade G, member 1 (C1-inhibitor) TCOF1 Treacle TIMP3 Metalloproteinase inhibitor 3 (TIMP3) TLR3 Toll-like receptor 3.

[1445] The identity of the protein associated with MD whose chromosomal sequence is edited can and will vary. In preferred embodiments, the proteins associated with MD whose chromosomal sequence is edited may be the ATP-binding cassette, sub-family A (ABC1) member 4 protein (ABCA4) encoded by the ABCR gene, the apolipoprotein E protein (APOE) encoded by the APOE gene, the chemokine (C-C motif) Ligand 2 protein (CCL2) encoded by the CCL2 gene, the chemokine (C-C motif) receptor 2 protein (CCR2) encoded by the CCR2 gene, the ceruloplasmin protein (CP) encoded by the CP gene, the cathepsin D protein (CTSD) encoded by the CTSD gene, or the metalloproteinase inhibitor 3 protein (TIMP3) encoded by the TIMP3 gene. In an exemplary embodiment, the genetically modified animal is a rat, and the edited chromosomal sequence encoding the protein associated with MD may be: (ABCA4) ATPbinding cassette, NM_000350 sub-family A (ABC1), member 4 APOE Apolipoprotein E NM_138828 (APOE) CCL2 Chemokine (C-C NM_031530 motif) Ligand 2 (CCL2) CCR2 Chemokine (C-C NM_021866 motif) receptor 2 (CCR2) CP ceruloplasmin (CP) NM_012532 CTSD Cathepsin D (CTSD) NM_134334 TIMP3 Metalloproteinase NM_012886 inhibitor 3 (TIMP3) The animal or cell may comprise 1, 2, 3, 4, 5, 6, 7 or more disrupted chromosomal sequences encoding a protein associated with MD and zero, 1, 2, 3, 4, 5, 6, 7 or more chromosomally integrated sequences encoding the disrupted protein associated with MD.

[1446] The edited or integrated chromosomal sequence may be modified to encode an altered protein associated with MD. Several mutations in MD-related chromosomal sequences have been associated with MD. Non-limiting examples of mutations in chromosomal sequences associated with MD include those that may cause MD including in the ABCR protein, E471K (i.e. glutamate at position 471 is changed to lysine), R1129L (i.e. arginine at position 1129 is changed to leucine), T1428M (i.e. threonine at position 1428 is changed to methionine), R15175 (i.e. arginine at position 1517 is changed to serine), I1562T (i.e. isoleucine at position 1562 is changed to threonine), and G1578R (i.e. glycine at position 1578 is changed to arginine); in the CCR2 protein, V64I (i.e. valine at position 192 is changed to isoleucine); in CP protein, G969B (i.e. glycine at position 969 is changed to asparagine or aspartate); in TIMP3 protein, S156C (i.e. serine at position 156 is changed to cysteine), G166C (i.e. glycine at position 166 is changed to cysteine), G167C (i.e. glycine at position 167 is changed to cysteine), Y168C (i.e. tyrosine at position 168 is changed to cysteine), S170C (i.e. serine at position 170 is changed to cysteine), Y172C (i.e. tyrosine at position 172 is changed to cysteine) and S181C (i.e. serine at position 181 is changed to cysteine). Other associations of genetic variants in MD-associated genes and disease are known in the art.

### Treating Circulatory and Muscular Diseases

[1447] The present invention also contemplates delivering the CRISPR-Cas system described herein, e.g. Cpf1 effector protein systems, to the heart. For the heart, a myocardium tropic adena-associated virus (AAVM) is preferred, in particular AAVM41 which showed preferential gene transfer in the heart (see, e.g., Lin-Yanga et al., PNAS, Mar. 10, 2009, vol. 106, no. 10). Administration may be systemic or local. A dosage of about 1-10×10¹⁴ vector genomes are contemplated for systemic administration. See also, e.g., Eulalio et al. (2012) Nature 492: 376 and Somasuntharam et al. (2013) Biomaterials 34: 7790.

[1448] For example, US Patent Publication No. 20110023139, describes use of zinc finger nucleases to genetically modify cells, animals and proteins associated with cardiovascular disease. Cardiovascular diseases generally include high blood pressure, heart attacks, heart failure, and stroke and TIA. Any chromosomal sequence involved in cardiovascular disease or the protein encoded by any chromosomal sequence involved in cardiovascular disease may be utilized in the methods described in this disclosure. The cardiovascular-related proteins are typically selected based on an experimental association of the cardiovascular-related protein to the development of cardiovascular disease. For example, the production rate or circulating concentration of a cardiovascular-related protein may be elevated or depressed in a population having a cardiovascular disorder relative to a population lacking the cardiovascular disorder. Differences in protein levels may be assessed using proteomic techniques including but not limited to Western blot, immunohistochemical staining, enzyme linked immunosorbent assay (ELISA), and mass spectrometry. Alternatively, the cardiovascular-related proteins may be identified by obtaining gene expression profiles of the genes encoding the proteins using genomic techniques including but not limited to DNA microarray analysis, serial analysis of gene expression (SAGE), and quantitative real-time polymerase chain reaction (Q-PCR).

[1449] By way of example, the chromosomal sequence may comprise, but is not limited to, IL1B (interleukin 1, beta), XDH (xanthine dehydrogenase), TP53 (tumor protein p53), PTGIS (prostaglandin 12 (prostacyclin) synthase), MB (myoglobin), IL4 (interleukin 4), ANGPT1 (angiopoietin 1), ABCG8 (ATP-binding cassette, sub-family G (WHITE), member 8), CTSK (cathepsin K), PTGIR (prostaglandin 12 (prostacyclin) receptor (IP)), KCNJ11 (potassium inwardly-rectifying channel, subfamily J, member 11), INS (insulin), CRP (C-reactive protein, pentraxin-related), PDGFRB (platelet-derived growth factor receptor, beta polypeptide), CCNA2 (cyclin A2), PDGFB (platelet-derived growth factor beta polypeptide (simian sarcoma viral (v-sis) oncogene homolog)), KCNJ5 (potassium inwardly-rectifying channel, subfamily J, member 5), KCNN3 (potassium intermediate/small conductance calcium-activated channel, subfamily N, member 3), CAPN10 (calpain 10), PTGES (prostaglandin E synthase), ADRA2B (adrenergic, alpha-2B-, receptor), ABCG5 (ATP-binding cassette, sub-family G (WHITE), member 5), PRDX2 (peroxiredoxin 2), CAPN5 (calpain 5), PARP14 (poly (ADP-ribose) polymerase family, member 14), MEX3C (mex-3 homolog C (C. elegans)), ACE angiotensin I converting enzyme (peptidyl-dipeptidase A) 1), TNF (tumor necrosis factor (TNF superfamily, member 2)), IL6 (interleukin 6 (interferon, beta 2)), STN (statin), SERPINE1 (serpin peptidase inhibitor, clade E (nexin, plasminogen activator inhibitor type 1), member 1), ALB (albumin), ADIPOQ (adiponectin, C1Q and collagen domain containing), APOB (apolipoprotein B (including Ag(x) antigen)), APOE (apolipoprotein E), LEP (leptin), MTHFR (5,10-methylenetetrahydrofolate reductase (NADPH)), APOA1 (apolipoprotein A-I), EDN1 (endothelin 1), NPPB (natriuretic peptide precursor B), NOS3 (nitric oxide synthase 3 (endothelial cell)), PPARG (peroxisome proliferator-activated receptor gamma), PLAT (plasminogen activator, tissue), PTGS2 (prostaglandin-endoperoxide synthase 2 (prostaglandin G/H synthase and cyclooxygenase)), CETP (cholesteryl ester transfer protein, plasma), AGTR1 (angiotensin II receptor, type 1), HMGCR (3-hydroxy-3-methylglutaryl-Coenzyme A reductase), IGF1 (insulin-like growth factor 1 (somatomedin C)), SELE (selectin E), REN (renin), PPARA (peroxisome proliferator-activated receptor alpha), PON1 (paraoxonase 1), KNG1 (kininogen 1), CCL2 (chemokine (C-C motif) ligand 2), LPL (lipoprotein lipase), VWF (von Willebrand factor), F2 (coagulation factor II (thrombin)), ICAM1 (intercellular adhesion molecule 1), TGFB1 (transforming growth factor, beta 1), NPPA (natriuretic peptide precursor A), IL10 (interleukin 10), EPO (erythropoietin), SOD1 (superoxide dismutase 1, soluble), VCAM1 (vascular cell adhesion molecule 1), IFNG (interferon, gamma), LPA (lipoprotein, Lp(a)), MPO (myeloperoxidase), ESR1 (estrogen receptor 1), MAPK1 (mitogen-activated protein kinase 1), HP (haptoglobin), F3 (coagulation factor III (thromboplastin, tissue factor)), CST3 (cystatin C), COG2 (component of oligomeric golgi complex 2), MMP9 (matrix metallopeptidase 9 (gelatinase B, 92 kDa gelatinase, 92 kDa type IV collagenase)), SERPINC1 (serpin peptidase inhibitor, clade C (antithrombin), member 1), F8 (coagulation factor VIII, procoagulant component), HMOX1 (heme oxygenase (decycling) 1), APOC3 (apolipoprotein C-III), IL8 (interleukin 8), PROK1 (prokineticin 1), CBS (cystathionine-beta-synthase), NOS2 (nitric oxide synthase 2, inducible), TLR4 (toll-like receptor 4), SELP (selectin P (granule membrane protein 140 kDa, antigen CD62)), ABCA1 (ATP-binding cassette, sub-family A (ABC1), member 1), AGT (angiotensinogen (serpin peptidase inhibitor, clade A, member 8)), LDLR (low density lipoprotein receptor), GPT (glutamic-pyruvate transaminase (alanine aminotransferase)), VEGFA (vascular endothelial growth factor A), NR3C2 (nuclear receptor subfamily 3, group C, member 2), IL18 (interleukin 18 (interferon-gamma-inducing factor)), NOS1 (nitric oxide synthase 1 (neuronal)), NR3C1 (nuclear receptor subfamily 3, group C, member 1 (glucocorticoid receptor)), FGB (fibrinogen beta chain), HGF (hepatocyte growth factor (hepapoietin A; scatter factor)), IL1A (interleukin 1, alpha), RETN (resistin), AKT1 (v-akt murine thymoma viral oncogene homolog 1), LIPC (lipase, hepatic), HSPD1 (heat shock 60 kDa protein 1 (chaperonin)), MAPK14 (mitogen-activated protein kinase 14), SPP1 (secreted phosphoprotein 1), ITGB3 (integrin, beta 3 (platelet glycoprotein 111a, antigen CD61)), CAT (catalase), UTS2 (urotensin 2), THBD (thrombomodulin), F10 (coagulation factor X), CP (ceruloplasmin (ferroxidase)), TNFRSF11B (tumor necrosis factor receptor superfamily, member 11b), EDNRA (endothelin receptor type A), EGFR (epidermal growth factor receptor (erythroblastic leukemia viral (v-erb-b) oncogene homolog, avian)), MMP2 (matrix metallopeptidase 2 (gelatinase A, 72 kDa gelatinase, 72 kDa type IV collagenase)), PLG (plasminogen), NPY (neuropeptide Y), RHOD (ras homolog gene family, member D), MAPK8 (mitogen-activated protein kinase 8), MYC (v-myc myelocytomatosis viral oncogene homolog (avian)), FN1 (fibronectin 1), CMA1 (chymase 1, mast cell), PLAU (plasminogen activator, urokinase), GNB3 (guanine nucleotide binding protein (G protein), beta polypeptide 3), ADRB2 (adrenergic, beta-2-, receptor, surface), APOA5 (apolipoprotein A-V), SOD2 (superoxide dismutase 2, mitochondrial), F5 (coagulation factor V (proaccelerin, labile factor)), VDR (vitamin D (1,25-dihydroxyvitamin D3) receptor), ALOX5 (arachidonate 5-lipoxygenase), HLA-DRB1 (major histocompatibility complex, class II, DR beta 1), PARP1 (poly (ADP-ribose) polymerase 1), CD40LG (CD40 ligand), PON2 (paraoxonase 2), AGER (advanced glycosylation end product-specific receptor), IRS1 (insulin receptor substrate 1), PTGS1 (prostaglandin-endoperoxide synthase 1 (prostaglandin G/H synthase and cyclooxygenase)), ECE1 (endothelin converting enzyme 1), F7 (coagulation factor VII (serum prothrombin conversion accelerator)), URN (interleukin 1 receptor antagonist), EPHX2 (epoxide hydrolase 2, cytoplasmic), IGFBP1 (insulin-like growth factor binding protein 1), MAPK10 (mitogen-activated protein kinase 10), FAS (Fas (TNF receptor superfamily, member 6)), ABCB1 (ATP-binding cassette, sub-family B (MDR/TAP), member 1), JUN (jun oncogene), IGFBP3 (insulin-like growth factor binding protein 3), CD14 (CD14 molecule), PDE5A (phosphodiesterase 5A, cGMP-specific), AGTR2 (angiotensin II receptor, type 2), CD40 (CD40 molecule, TNF receptor superfamily member 5), LCAT (lecithin-cholesterol acyltransferase), CCR5 (chemokine (C-C motif) receptor 5), MMP1 (matrix metallopeptidase 1 (interstitial collagenase)), TIMP1 (TIMP metallopeptidase inhibitor 1), ADM (adrenomedullin), DYT10 (dystonia 10), STAT3 (signal transducer and activator of transcription 3 (acute-phase response factor)), MMP3 (matrix metallopeptidase 3 (stromelysin 1, progelatinase)), ELN (elastin), USF 1 (upstream transcription factor 1), CFH (complement factor H), HSPA4 (heat shock 70 kDa protein 4), MMP12 (matrix metallopeptidase 12 (macrophage elastase)), MME (membrane metallo-endopeptidase), F2R (coagulation factor II (thrombin) receptor), SELL (selectin L), CTSB (cathepsin B), ANXA5 (annexin A5), ADRB1 (adrenergic, beta-1-, receptor), CYBA (cytochrome b-245, alpha polypeptide), FGA (fibrinogen alpha chain), GGT1 (gamma-glutamyltransferase 1), LIPG (lipase, endothelial), HIF1A (hypoxia inducible factor 1, alpha subunit (basic helix-loop-helix transcription factor)), CXCR4 (chemokine (C-X-C motif) receptor 4), PROC (protein C (inactivator of coagulation factors Va and VIIIa)), SCARB1 (scavenger receptor class B, member 1), CD79A (CD79a molecule, immunoglobulin-associated alpha), PLTP (phospholipid transfer protein), ADD1 (adducin 1 (alpha)), FGG (fibrinogen gamma chain), SAA1 (serum amyloid A1), KCNH2 (potassium voltage-gated channel, subfamily H (eag-related), member 2), DPP4 (dipeptidyl-peptidase 4), G6PD (glucose-6-phosphate dehydrogenase), NPR1 (natriuretic peptide receptor A/guanylate cyclase A (atrionatriuretic peptide receptor A)), VTN (vitronectin), KIAA0101 (KIAA0101), FOS (FBJ murine osteosarcoma viral oncogene homolog), TLR2 (toll-like receptor 2), PPIG (peptidylprolyl isomerase G (cyclophilin G)), IL1R1 (interleukin 1 receptor, type I), AR (androgen receptor), CYP1A1 (cytochrome P450, family 1, subfamily A, polypeptide 1), SERPINA1 (serpin peptidase inhibitor, clade A (alpha-1 antiproteinase, antitrypsin), member 1), MTR (5-methyltetrahydrofolate-homocysteine methyltransferase), RBP4 (retinol binding protein 4, plasma), APOA4 (apolipoprotein A-IV), CDKN2A (cyclin-dependent kinase inhibitor 2A (melanoma, p16, inhibits CDK4)), FGF2 (fibroblast growth factor 2 (basic)), EDNRB (endothelin receptor type B), ITGA2 (integrin, alpha 2 (CD49B, alpha 2 subunit of VLA-2 receptor)), CABIN1 (calcineurin binding protein 1), SHBG (sex hormone-binding globulin), HMGB1 (high-mobility group box 1), HSP90B2P (heat shock protein 90 kDa beta (Grp94), member 2 (pseudogene)), CYP3A4 (cytochrome P450, family 3, subfamily A, polypeptide 4), GJA1 (gap junction protein, alpha 1, 43 kDa), CAV1 (caveolin 1, caveolae protein, 22 kDa), ESR2 (estrogen receptor 2 (ER beta)), LTA (lymphotoxin alpha (TNF superfamily, member 1)), GDF15 (growth differentiation factor 15), BDNF (brain-derived neurotrophic factor), CYP2D6 (cytochrome P450, family 2, subfamily D, polypeptide 6), NGF (nerve growth factor (beta polypeptide)), SP1 (Sp1 transcription factor), TGIF1 (TGFB-induced factor homeobox 1), SRC (v-src sarcoma (Schmidt-Ruppin A-2) viral oncogene homolog (avian)), EGF (epidermal growth factor (beta-urogastrone)), PIK3CG (phosphoinositide-3-kinase, catalytic, gamma polypeptide), HLA-A (major histocompatibility complex, class I, A), KCNQ1 (potassium voltage-gated channel, KQT-like subfamily, member 1), CNR1 (cannabinoid receptor 1 (brain)), FBN1 (fibrillin 1), CHKA (choline kinase alpha), BEST1 (bestrophin 1), APP (amyloid beta (A4) precursor protein), CTNNB1 (catenin (cadherin-associated protein), beta 1, 88 kDa), IL2 (interleukin 2), CD36 (CD36 molecule (thrombospondin receptor)), PRKAB1 (protein kinase, AMP-activated, beta 1 non-catalytic subunit), TPO (thyroid peroxidase), ALDH7A1 (aldehyde dehydrogenase 7 family, member A1), CX3CR1 (chemokine (C-X3-C motif) receptor 1), TH (tyrosine hydroxylase), F9 (coagulation factor IX), GH1 (growth hormone 1), TF (transferrin), HFE (hemochromatosis), IL17A (interleukin 17A), PTEN (phosphatase and tensin homolog), GSTM1 (glutathione S-transferase mu 1), DMD (dystrophin), GATA4 (GATA binding protein 4), F13A1 (coagulation factor XIII, A1 polypeptide), TTR (transthyretin), FABP4 (fatty acid binding protein 4, adipocyte), PON3 (paraoxonase 3), APOC1 (apolipoprotein C-I), INSR (insulin receptor), TNFRSF1B (tumor necrosis factor receptor superfamily, member 1B), HTR2A (5-hydroxytryptamine (serotonin) receptor 2A), CSF3 (colony stimulating factor 3 (granulocyte)), CYP2C9 (cytochrome P450, family 2, subfamily C, polypeptide 9), TXN (thioredoxin), CYP11B2 (cytochrome P450, family 11, subfamily B, polypeptide 2), PTH (parathyroid hormone), CSF2 (colony stimulating factor 2 (granulocyte-macrophage)), KDR (kinase insert domain receptor (a type III receptor tyrosine kinase)), PLA2G2A (phospholipase A2, group IIA (platelets, synovial fluid)), B2M (beta-2-microglobulin), THBS1 (thrombospondin 1), GCG (glucagon), RHOA (ras homolog gene family, member A), ALDH2 (aldehyde dehydrogenase 2 family (mitochondrial)), TCF7L2 (transcription factor 7-like 2 (T-cell specific, HMG-box)), BDKRB2 (bradykinin receptor B2), NFE2L2 (nuclear factor (erythroid-derived 2)-like 2), NOTCH1 (Notch homolog 1, translocation-associated (Drosophila)), UGT1A1 (UDP glucuronosyltransferase 1 family, polypeptide A1), IFNA1 (interferon, alpha 1), PPARD (peroxisome proliferator-activated receptor delta), SIRT1 (sirtuin (silent mating type information regulation 2 homolog) 1 (S. cerevisiae)), GNRH1 (gonadotropin-releasing hormone 1 (luteinizing-releasing hormone)), PAPPA (pregnancy-associated plasma protein A, pappalysin 1), ARR3 (arrestin 3, retinal (X-arrestin)), NPPC (natriuretic peptide precursor C), AHSP (alpha hemoglobin stabilizing protein), PTK2 (PTK2 protein tyrosine kinase 2), IL13 (interleukin 13), MTOR (mechanistic target of rapamycin (serine/threonine kinase)), ITGB2 (integrin, beta 2 (complement component 3 receptor 3 and 4 subunit)), GSTT1 (glutathione S-transferase theta 1), IL6ST (interleukin 6 signal transducer (gp130, oncostatin M receptor)), CPB2 (carboxypeptidase B2 (plasma)), CYP1A2 (cytochrome P450, family 1, subfamily A, polypeptide 2), HNF4A (hepatocyte nuclear factor 4, alpha), SLC6A4 (solute carrier family 6 (neurotransmitter transporter, serotonin), member 4), PLA2G6 (phospholipase A2, group VI (cytosolic, calcium-independent)), TNFSF11 (tumor necrosis factor (ligand) superfamily, member 11), SLC8A1 (solute carrier family 8 (sodium/calcium exchanger), member 1), F2RL1 (coagulation factor II (thrombin) receptor-like 1), AKR1A1 (aldo-keto reductase family 1, member A1 (aldehyde reductase)), ALDH9A1 (aldehyde dehydrogenase 9 family, member A1), BGLAP (bone gamma-carboxyglutamate (gla) protein), MTTP (microsomal triglyceride transfer protein), MTRR (5-methyltetrahydrofolate-homocysteine methyltransferase reductase), SULT1A3 (sulfotransferase family, cytosolic, 1A, phenol-preferring, member 3), RAGE (renal tumor antigen), C4B (complement component 4B (Chido blood group), P2RY12 (purinergic receptor P2Y, G-protein coupled, 12), RNLS (renalase, FAD-dependent amine oxidase), CREB1 (cAMP responsive element binding protein 1), POMC (proopiomelanocortin), RAC1 (ras-related C3 botulinum toxin substrate 1 (rho family, small GTP binding protein Rac1)), LMNA (lamin NC), CD59 (CD59 molecule, complement regulatory protein), SCN5A (sodium channel, voltage-gated, type V, alpha subunit), CYP1B1 (cytochrome P450, family 1, subfamily B, polypeptide 1), MIF (macrophage migration inhibitory factor (glycosylation-inhibiting factor)), MMP13 (matrix metallopeptidase 13 (collagenase 3)), TIMP2 (TIMP metallopeptidase inhibitor 2), CYP19A1 (cytochrome P450, family 19, subfamily A, polypeptide 1), CYP21A2 (cytochrome P450, family 21, subfamily A, polypeptide 2), PTPN22 (protein tyrosine phosphatase, non-receptor type 22 (lymphoid)), MYH14 (myosin, heavy chain 14, non-muscle), MBL2 (mannose-binding lectin (protein C) 2, soluble (opsonic defect)), SELPLG (selectin P ligand), AOC3 (amine oxidase, copper containing 3 (vascular adhesion protein 1)), CTSL1 (cathepsin L1), PCNA (proliferating cell nuclear antigen), IGF2 (insulin-like growth factor 2 (somatomedin A)), ITGB1 (integrin, beta 1 (fibronectin receptor, beta polypeptide, antigen CD29 includes MDF2, MSK12)), CAST (calpastatin), CXCL12 (chemokine (C-X-C motif) ligand 12 (stromal cell-derived factor 1)), IGHE (immunoglobulin heavy constant epsilon), KCNE1 (potassium voltage-gated channel, Isk-related family, member 1), TFRC (transferrin receptor (p90, CD71)), COL1A1 (collagen, type I, alpha 1), COL1A2 (collagen, type I, alpha 2), IL2RB (interleukin 2 receptor, beta), PLA2G10 (phospholipase A2, group X), ANGPT2 (angiopoietin 2), PROCR (protein C receptor, endothelial (EPCR)), NOX4 (NADPH oxidase 4), HAMP (hepcidin antimicrobial peptide), PTPN11 (protein tyrosine phosphatase, non-receptor type 11), SLC2A1 (solute carrier family 2 (facilitated glucose transporter), member 1), IL2RA (interleukin 2 receptor, alpha), CCL5 (chemokine (C-C motif) ligand 5), IRF1 (interferon regulatory factor 1), CFLAR (CASP8 and FADD-like apoptosis regulator), CALCA (calcitonin-related polypeptide alpha), EIF4E (eukaryotic translation initiation factor 4E), GSTP1 (glutathione S-transferase pi 1), JAK2 (Janus kinase 2), CYP3A5 (cytochrome P450, family 3, subfamily A, polypeptide 5), HSPG2 (heparan sulfate proteoglycan 2), CCL3 (chemokine (C-C motif) ligand 3), MYD88 (myeloid differentiation primary response gene (88)), VIP (vasoactive intestinal peptide), SOAT1 (sterol O-acyltransferase 1), ADRBK1 (adrenergic, beta, receptor kinase 1), NR4A2 (nuclear receptor subfamily 4, group A, member 2), MMP8 (matrix metallopeptidase 8 (neutrophil collagenase)), NPR2 (natriuretic peptide receptor B/guanylate cyclase B (atrionatriuretic peptide receptor B)), GCH1 (GTP cyclohydrolase 1), EPRS (glutamyl-prolyl-tRNA synthetase), PPARGC1A (peroxisome proliferator-activated receptor gamma, coactivator 1 alpha), F12 (coagulation factor XII (Hageman factor)), PECAM1 (platelet/endothelial cell adhesion molecule), CCL4 (chemokine (C-C motif) ligand 4), SERPINA3 (serpin peptidase inhibitor, clade A (alpha-1 antiproteinase, antitrypsin), member 3), CASR (calcium-sensing receptor), GJA5 (gap junction protein, alpha 5, 40 kDa), FABP2 (fatty acid binding protein 2, intestinal), TTF2 (transcription termination factor, RNA polymerase II), PROS 1 (protein S (alpha)), CTF 1 (cardiotrophin 1), SGCB (sarcoglycan, beta (43 kDa dystrophin-associated glycoprotein)), YME1L1 (YME1-like 1 (S. cerevisiae)), CAMP (cathelicidin antimicrobial peptide), ZC3H12A (zinc finger CCCH-type containing 12A), AKR1B1 (aldo-keto reductase family 1, member B1 (aldose reductase)), DES (desmin), MMP7 (matrix metallopeptidase 7 (matrilysin, uterine)), AHR (aryl hydrocarbon receptor), CSF1 (colony stimulating factor 1 (macrophage)), HDAC9 (histone deacetylase 9), CTGF (connective tissue growth factor), KCNMA1 (potassium large conductance calcium-activated channel, subfamily M, alpha member 1), UGT1A (UDP glucuronosyltransferase 1 family, polypeptide A complex locus), PRKCA (protein kinase C, alpha), COMT (catechol-.beta.-methyltransferase), S100B (S100 calcium binding protein B), EGR1 (early growth response 1), PRL (prolactin), IL15 (interleukin 15), DRD4 (dopamine receptor D4), CAMK2G (calcium/calmodulin-dependent protein kinase II gamma), SLC22A2 (solute carrier family 22 (organic cation transporter), member 2), CCL11 (chemokine (C-C motif) ligand 11), PGF (B321 placental growth factor), THPO (thrombopoietin), GP6 (glycoprotein VI (platelet)), TACR1 (tachykinin receptor 1), NTS (neurotensin), HNF1A (HNF1 homeobox A), SST (somatostatin), KCND1 (potassium voltage-gated channel, Sha1-related subfamily, member 1), LOC646627 (phospholipase inhibitor), TBXAS1 (thromboxane A synthase 1 (platelet)), CYP2J2 (cytochrome P450, family 2, subfamily J, polypeptide 2), TBXA2R (thromboxane A2 receptor), ADH1C (alcohol dehydrogenase 1C (class I), gamma polypeptide), ALOX12 (arachidonate 12-lipoxygenase), AHSG (alpha-2-HS-glycoprotein), BHMT (betaine-homocysteine methyltransferase), GJA4 (gap junction protein, alpha 4, 37 kDa), SLC25A4 (solute carrier family 25 (mitochondrial carrier; adenine nucleotide translocator), member 4), ACLY (ATP citrate lyase), ALOX5AP (arachidonate 5-lipoxygenase-activating protein), NUMA1 (nuclear mitotic apparatus protein 1), CYP27B1 (cytochrome P450, family 27, subfamily B, polypeptide 1), CYSLTR2 (cysteinyl leukotriene receptor 2), SOD3 (superoxide dismutase 3, extracellular), LTC4S (leukotriene C4 synthase), UCN (urocortin), GHRL (ghrelin/obestatin prepropeptide), APOC2 (apolipoprotein C-II), CLEC4A (C-type lectin domain family 4, member A), KBTBD10 (kelch repeat and BTB (POZ) domain containing 10), TNC (tenascin C), TYMS (thymidylate synthetase), SHC1 (SHC (Src homology 2 domain containing) transforming protein 1), LRP1 (low density lipoprotein receptor-related protein 1), SOCS3 (suppressor of cytokine signaling 3), ADH1B (alcohol dehydrogenase 1B (class I), beta polypeptide), KLK3 (kallikrein-related peptidase 3), HSD11B1 (hydroxysteroid (11-beta) dehydrogenase 1), VKORC1 (vitamin K epoxide reductase complex, subunit 1), SERPINB2 (serpin peptidase inhibitor, clade B (ovalbumin), member 2), TNS1 (tensin 1), RNF19A (ring finger protein 19A), EPOR (erythropoietin receptor), ITGAM (integrin, alpha M (complement component 3 receptor 3 subunit)), PITX2 (paired-like homeodomain 2), MAPK7 (mitogen-activated protein kinase 7), FCGR3A (Fc fragment of IgG, low affinity 111a, receptor (CD16a)), LEPR (leptin receptor), ENG (endoglin), GPX1 (glutathione peroxidase 1), GOT2 (glutamic-oxaloacetic transaminase 2, mitochondrial (aspartate aminotransferase 2)), HRH1 (histamine receptor H1), NR112 (nuclear receptor subfamily 1, group I, member 2), CRH (corticotropin releasing hormone), HTR1A (5-hydroxytryptamine (serotonin) receptor 1A), VDAC1 (voltage-dependent anion channel 1), HPSE (heparanase), SFTPD (surfactant protein D), TAP2 (transporter 2, ATP-binding cassette, sub-family B (MDR/TAP)), RNF123 (ring finger protein 123), PTK2B (PTK2B protein tyrosine kinase 2 beta), NTRK2 (neurotrophic tyrosine kinase, receptor, type 2), IL6R (interleukin 6 receptor), ACHE (acetylcholinesterase (Yt blood group)), GLP1R (glucagon-like peptide 1 receptor), GHR (growth hormone receptor), GSR (glutathione reductase), NQO1 (NAD(P)H dehydrogenase, quinone 1), NR5A1 (nuclear receptor subfamily 5, group A, member 1), GJB2 (gap junction protein, beta 2, 26 kDa), SLC9A1 (solute carrier family 9 (sodium/hydrogen exchanger), member 1), MAOA (monoamine oxidase A), PCSK9 (proprotein convertase subtilisin/kexin type 9), FCGR2A (Fc fragment of IgG, low affinity IIa, receptor (CD32)), SERPINF1 (serpin peptidase inhibitor, clade F (alpha-2 antiplasmin, pigment epithelium derived factor), member 1), EDN3 (endothelin 3), DHFR (dihydrofolate reductase), GAS6 (growth arrest-specific 6), SMPD1 (sphingomyelin phosphodiesterase 1, acid lysosomal), UCP2 (uncoupling protein 2 (mitochondrial, proton carrier)), TFAP2A (transcription factor AP-2 alpha (activating enhancer binding protein 2 alpha)), C4BPA (complement component 4 binding protein, alpha), SERPINF2 (serpin peptidase inhibitor, clade F (alpha-2 antiplasmin, pigment epithelium derived factor), member 2), TYMP (thymidine phosphorylase), ALPP (alkaline phosphatase, placental (Regan isozyme)), CXCR2 (chemokine (C-X-C motif) receptor 2), SLC39A3 (solute carrier family 39 (zinc transporter), member 3), ABCG2 (ATP-binding cassette, sub-family G (WHITE), member 2), ADA (adenosine deaminase), JAK3 (Janus kinase 3), HSPA1A (heat shock 70 kDa protein 1A), FASN (fatty acid synthase), FGF1 (fibroblast growth factor 1 (acidic)), F11 (coagulation factor XI), ATP7A (ATPase, Cu++ transporting, alpha polypeptide), CR1 (complement component (3b/4b) receptor 1 (Knops blood group)), GFAP (glial fibrillary acidic protein), ROCK1 (Rho-associated, coiled-coil containing protein kinase 1), MECP2 (methyl CpG binding protein 2 (Rett syndrome)), MYLK (myosin light chain kinase), BCHE (butyrylcholinesterase), LIPE (lipase, hormone-sensitive), PRDX5 (peroxiredoxin 5), ADORA1 (adenosine A1 receptor), WRN (Werner syndrome, RecQ helicase-like), CXCR3 (chemokine (C-X-C motif) receptor 3), CD81 (CD81 molecule), SMAD7 (SMAD family member 7), LAMC2 (laminin, gamma 2), MAP3K5 (mitogen-activated protein kinase kinase kinase 5), CHGA (chromogranin A (parathyroid secretory protein 1)), IAPP (islet amyloid polypeptide), RHO (rhodopsin), ENPP1 (ectonucleotide pyrophosphatase/phosphodiesterase 1), PTHLH (parathyroid hormone-like hormone), NRG1 (neuregulin 1), VEGFC (vascular endothelial growth factor C), ENPEP (glutamyl aminopeptidase (aminopeptidase A)), CEBPB (CCAAT/enhancer binding protein (C/EBP), beta), NAGLU (N-acetylglucosaminidase, alpha-), F2RL3 (coagulation factor II (thrombin) receptor-like 3), CX3CL1 (chemokine (C-X3-C motif) ligand 1), BDKRB1 (bradykinin receptor B1), ADAMTS13 (ADAM metallopeptidase with thrombospondin type 1 motif, 13), ELANE (elastase, neutrophil expressed), ENPP2 (ectonucleotide pyrophosphatase/phosphodiesterase 2), CISH (cytokine inducible SH2-containing protein), GAST (gastrin), MYOC (myocilin, trabecular meshwork inducible glucocorticoid response), ATP1A2 (ATPase, Na+/K+ transporting, alpha 2 polypeptide), NF1 (neurofibromin 1), GJB1 (gap junction protein, beta 1, 32 kDa), MEF2A (myocyte enhancer factor 2A), VCL (vinculin), BMPR2 (bone morphogenetic protein receptor, type II (serine/threonine kinase)), TUBB (tubulin, beta), CDC42 (cell division cycle 42 (GTP binding protein, 25 kDa)), KRT18 (keratin 18), HSF1 (heat shock transcription factor 1), MYB (v-myb myeloblastosis viral oncogene homolog (avian)), PRKAA2 (protein kinase, AMP-activated, alpha 2 catalytic subunit), ROCK2 (Rho-associated, coiled-coil containing protein kinase 2), TFPI (tissue factor pathway inhibitor (lipoprotein-associated coagulation inhibitor)), PRKG1 (protein kinase, cGMP-dependent, type I), BMP2 (bone morphogenetic protein 2), CTNND1 (catenin (cadherin-associated protein), delta 1), CTH (cystathionase (cystathionine gamma-lyase)), CTSS (cathepsin S), VAV2 (vav 2 guanine nucleotide exchange factor), NPY2R (neuropeptide Y receptor Y2), IGFBP2 (insulin-like growth factor binding protein 2, 36 kDa), CD28 (CD28 molecule), GSTA1 (glutathione S-transferase alpha 1), PPIA (peptidylprolyl isomerase A (cyclophilin A)), APOH (apolipoprotein H (beta-2-glycoprotein I)), S100A8 (S100 calcium binding protein A8), IL11 (interleukin 11), ALOX15 (arachidonate 15-lipoxygenase), FBLN1 (fibulin 1), NR1H3 (nuclear receptor subfamily 1, group H, member 3), SCD (stearoyl-CoA desaturase (delta-9-desaturase)), GIP (gastric inhibitory polypeptide), CHGB (chromogranin B (secretogranin 1)), PRKCB (protein kinase C, beta), SRD5A1 (steroid-5-alpha-reductase, alpha polypeptide 1 (3-oxo-5 alpha-steroid delta 4-dehydrogenase alpha 1)), HSD11B2 (hydroxysteroid (11-beta) dehydrogenase 2), CALCRL (calcitonin receptor-like), GALNT2 (UDP-N-acetyl-alpha-D-galactosamine:polypeptide N-acetylgalactosaminyltransferase 2 (GalNAc-T2)), ANGPTL4 (angiopoietin-like 4), KCNN4 (potassium intermediate/small conductance calcium-activated channel, subfamily N, member 4), PIK3C2A (phosphoinositide-3-kinase, class 2, alpha polypeptide), HBEGF (heparin-binding EGF-like growth factor), CYP7A1 (cytochrome P450, family 7, subfamily A, polypeptide 1), HLA-DRB5 (major histocompatibility complex, class II, DR beta 5), BNIP3 (BCL2/adenovirus E1B 19 kDa interacting protein 3), GCKR (glucokinase (hexokinase 4) regulator), S100A12 (S100 calcium binding protein A12), PADI4 (peptidyl arginine deiminase, type IV), HSPA14 (heat shock 70 kDa protein 14), CXCR1 (chemokine (C-X-C motif) receptor 1), H19 (H19, imprinted maternally expressed transcript (non-protein coding)), KRTAP19-3 (keratin associated protein 19-3), IDDM2 (insulin-dependent diabetes mellitus 2), RAC2 (ras-related C3 botulinum toxin substrate 2 (rho family, small GTP binding protein Rac2)), RYR1 (ryanodine receptor 1 (skeletal)), CLOCK (clock homolog (mouse)), NGFR (nerve growth factor receptor (TNFR superfamily, member 16)), DBH (dopamine beta-hydroxylase (dopamine beta-monooxygenase)), CHRNA4 (cholinergic receptor, nicotinic, alpha 4), CACNA1C (calcium channel, voltage-dependent, L type, alpha 1C subunit), PRKAG2 (protein kinase, AMP-activated, gamma 2 non-catalytic subunit), CHAT (choline acetyltransferase), PTGDS (prostaglandin D2 synthase 21 kDa (brain)), NR1H2 (nuclear receptor subfamily 1, group H, member 2), TEK (TEK tyrosine kinase, endothelial), VEGFB (vascular endothelial growth factor B), MEF2C (myocyte enhancer factor 2C), MAPKAPK2 (mitogen-activated protein kinase-activated protein kinase 2), TNFRSF11A (tumor necrosis factor receptor superfamily, member 11a, NFKB activator), HSPA9 (heat shock 70 kDa protein 9 (mortalin)), CYSLTR1 (cysteinyl leukotriene receptor 1), MAT1A (methionine adenosyltransferase I, alpha), OPRL1 (opiate receptor-like 1), IMPA1 (inositol(myo)-1 (or 4)-monophosphatase 1), CLCN2 (chloride channel 2), DLD (dihydrolipoamide dehydrogenase), PSMA6 (proteasome (prosome, macropain) subunit, alpha type, 6), PSMB8 (proteasome (prosome, macropain) subunit, beta type, 8 (large multifunctional peptidase 7)), CHI3L1 (chitinase 3-like 1 (cartilage glycoprotein-39)), ALDH1B1 (aldehyde dehydrogenase 1 family, member B1), PARP2 (poly (ADP-ribose) polymerase 2), STAR (steroidogenic acute regulatory protein), LBP (lipopolysaccharide binding protein), ABCC6 (ATP-binding cassette, sub-family C(CFTR/MRP), member 6), RGS2 (regulator of G-protein signaling 2, 24 kDa), EFNB2 (ephrin-B2), GJB6 (gap junction protein, beta 6, 30 kDa), APOA2 (apolipoprotein A-II), AMPD1 (adenosine monophosphate deaminase 1), DYSF (dysferlin, limb girdle muscular dystrophy 2B (autosomal recessive)), FDFT1 (farnesyl-diphosphate farnesyltransferase 1), EDN2 (endothelin 2), CCR6 (chemokine (C-C motif) receptor 6), GJB3 (gap junction protein, beta 3, 31 kDa), IL1RL1 (interleukin 1 receptor-like 1), ENTPD1 (ectonucleoside triphosphate diphosphohydrolase 1), BB S4 (Bardet-Biedl syndrome 4), CELSR2 (cadherin, EGF LAG seven-pass G-type receptor 2 (flamingo homolog, Drosophila)), F11R (F11 receptor), RAPGEF3 (Rap guanine nucleotide exchange factor (GEF) 3), HYAL1 (hyaluronoglucosaminidase 1), ZNF259 (zinc finger protein 259), ATOX1 (ATX1 antioxidant protein 1 homolog (yeast)), ATF6 (activating transcription factor 6), KHK (ketohexokinase (fructokinase)), SAT1 (spermidine/spermine N1-acetyltransferase 1), GGH (gamma-glutamyl hydrolase (conjugase, folylpolygammaglutamyl hydrolase)), TIMP4 (TIMP metallopeptidase inhibitor 4), SLC4A4 (solute carrier family 4, sodium bicarbonate cotransporter, member 4), PDE2A (phosphodiesterase 2A, cGMP-stimulated), PDE3B (phosphodiesterase 3B, cGMP-inhibited), FADS1 (fatty acid desaturase 1), FADS2 (fatty acid desaturase 2), TMSB4X (thymosin beta 4, X-linked), TXNIP (thioredoxin interacting protein), LIMS1 (LIM and senescent cell antigen-like domains 1), RHOB (ras homolog gene family, member B), LY96 (lymphocyte antigen 96), FOXO1 (forkhead box O1), PNPLA2 (patatin-like phospholipase domain containing 2), TRH (thyrotropin-releasing hormone), GJC1 (gap junction protein, gamma 1, 45 kDa), SLC17A5 (solute carrier family 17 (anion/sugar transporter), member 5), FTO (fat mass and obesity associated), GJD2 (gap junction protein, delta 2, 36 kDa), PSRC1 (proline/serine-rich coiled-coil 1), CASP12 (caspase 12 (gene/pseudogene)), GPBAR1 (G protein-coupled bile acid receptor 1), PXK (PX domain containing serine/threonine kinase), IL33 (interleukin 33), TRIB1 (tribbles homolog 1 (Drosophila)), PBX4 (pre-B-cell leukemia homeobox 4), NUPR1 (nuclear protein, transcriptional regulator, 1), 15-Sep (15 kDa selenoprotein), CILP2 (cartilage intermediate layer protein 2), TERC (telomerase RNA component), GGT2 (gamma-glutamyltransferase 2), MT-CO1 (mitochondrially encoded cytochrome c oxidase I), and UOX (urate oxidase, pseudogene). Any of these sequences, may be a target for the CRISPR-Cas system, e.g., to address mutation.

[1450] In an additional embodiment, the chromosomal sequence may further be selected from Pon1 (paraoxonase 1), LDLR (LDL receptor), ApoE (Apolipoprotein E), Apo B-100 (Apolipoprotein B-100), ApoA (Apolipoprotein(a)), ApoA1 (Apolipoprotein A1), CBS (Cystathione B-synthase), Glycoprotein IIb/IIb, MTHRF (5,10-methylenetetrahydrofolate reductase (NADPH), and combinations thereof. In one iteration, the chromosomal sequences and proteins encoded by chromosomal sequences involved in cardiovascular disease may be chosen from Cacna1C, Sod1, Pten, Ppar(alpha), Apo E, Leptin, and combinations thereof as target(s) for the CRISPR-Cas system.

### Treating Diseases of the Liver and Kidney

[1451] The present invention also contemplates delivering the CRISPR-Cas system described herein, e.g. Cpf1 effector protein systems, to the liver and/or kidney. Delivery strategies to induce cellular uptake of the therapeutic nucleic acid include physical force or vector systems such as viral-, lipid- or complex-based delivery, or nanocarriers. From the initial applications with less possible clinical relevance, when nucleic acids were addressed to renal cells with hydrodynamic high pressure injection systemically, a wide range of gene therapeutic viral and non-viral carriers have been applied already to target posttranscriptional events in different animal kidney disease models in vivo (Csaba Révész and Peter Hamar (2011). Delivery Methods to Target RNAs in the Kidney, Gene Therapy Applications, Prof. Chunsheng Kang (Ed.), ISBN: 978-953-307-541-9, InTech, Available from: http://www.intechopen.com/books/gene-therapy-applications/delivery-methods-to-target-rnas-inthe-kidney). Delivery methods to the kidney may include those in Yuan et al. (Am J Physiol Renal Physiol 295: F605-F617, 2008) investigated whether in vivo delivery of small interfering RNAs (siRNAs) targeting the 12/15-lipoxygenase (12/15-LO) pathway of arachidonate acid metabolism can ameliorate renal injury and diabetic nephropathy (DN) in a streptozotocininjected mouse model of type 1 diabetes. To achieve greater in vivo access and siRNA expression in the kidney, Yuan et al. used double-stranded 12/15-LO siRNA oligonucleotides conjugated with cholesterol. About 400 μg of siRNA was injected subcutaneously into mice. The method of Yuang et al. may be applied to the CRISPR Cas system of the present invention contemplating a 1-2 g subcutaneous injection of CRISPR Cas conjugated with cholesterol to a human for delivery to the kidneys.

[1452] Molitoris et al. (J Am Soc Nephrol 20: 1754-1764, 2009) exploited proximal tubule cells (PTCs), as the site of oligonucleotide reabsorption within the kidney to test the efficacy of siRNA targeted to p53, a pivotal protein in the apoptotic pathway, to prevent kidney injury. Naked synthetic siRNA to p53 injected intravenously 4 h after ischemic injury maximally protected both PTCs and kidney function. Molitoris et al.'s data indicates that rapid delivery of siRNA to proximal tubule cells follows intravenous administration. For dose-response analysis, rats were injected with doses of siP53, 0.33; 1, 3, or 5 mg/kg, given at the same four time points, resulting in cumulative doses of 1.32; 4, 12, and 20 mg/kg, respectively. All siRNA doses tested produced a SCr reducing effect on day one with higher doses being effective over approximately five days compared with PBS-treated ischemic control rats. The 12 and 20 mg/kg cumulative doses provided the best protective effect. The method of Molitoris et al. may be applied to the nucleic acid-targeting system of the present invention contemplating 12 and 20 mg/kg cumulative doses to a human for delivery to the kidneys.

[1453] Thompson et al. (Nucleic Acid Therapeutics, Volume 22, Number 4, 2012) reports the toxicological and pharmacokinetic properties of the synthetic, small interfering RNA I5NP following intravenous administration in rodents and nonhuman primates. I5NP is designed to act via the RNA interference (RNAi) pathway to temporarily inhibit expression of the pro-apoptotic protein p53 and is being developed to protect cells from acute ischemia/reperfusion injuries such as acute kidney injury that can occur during major cardiac surgery and delayed graft function that can occur following renal transplantation. Doses of 800 mg/kg I5NP in rodents, and 1,000 mg/kg I5NP in nonhuman primates, were required to elicit adverse effects, which in the monkey were isolated to direct effects on the blood that included a sub-clinical activation of complement and slightly increased clotting times. In the rat, no additional adverse effects were observed with a rat analogue of I5NP, indicating that the effects likely represent class effects of synthetic RNA duplexes rather than toxicity related to the intended pharmacologic activity of I5NP. Taken together, these data support clinical testing of intravenous administration of I5NP for the preservation of renal function following acute ischemia/reperfusion injury. The no observed adverse effect level (NOAEL) in the monkey was 500 mg/kg. No effects on cardiovascular, respiratory, and neurologic parameters were observed in monkeys following i.v. administration at dose levels up to 25 mg/kg. Therefore, a similar dosage may be contemplated for intravenous administration of CRISPR Cas to the kidneys of a human.

[1454] Shimizu et al. (J Am Soc Nephrol 21: 622-633, 2010) developed a system to target delivery of siRNAs to glomeruli via poly(ethylene glycol)-poly(L-lysine)-based vehicles. The siRNA/nanocarrier complex was approximately 10 to 20 nm in diameter, a size that would allow it to move across the fenestrated endothelium to access to the mesangium. After intraperitoneal injection of fluorescence-labeled siRNA/nanocarrier complexes, Shimizu et al. detected siRNAs in the blood circulation for a prolonged time. Repeated intraperitoneal administration of a mitogen-activated protein kinase 1 (MAPK1) siRNA/nanocarrier complex suppressed glomerular MAPK1 mRNA and protein expression in a mouse model of glomerulonephritis. For the investigation of siRNA accumulation, Cy5-labeled siRNAs complexed with PIC nanocarriers (0.5 ml, 5 nmol of siRNA content), naked Cy5-labeled siRNAs (0.5 ml, 5 nmol), or Cy5-labeled siRNAs encapsulated in HVJ-E (0.5 ml, 5 nmol of siRNA content) were administrated to BALBc mice. The method of Shimizu et al. may be applied to the nucleic acid-targeting system of the present invention contemplating a dose of about of 10-20 μmol CRISPR Cas complexed with nanocarriers in about 1-2 liters to a human for intraperitoneal administration and delivery to the kidneys.

[1455] Delivery methods to the kidney are summarized as follows:

| Delivery | | Target | | | Functional | |
|---|---|---|---|---|---|---|
| method | Carrier | RNA | Disease | Model | assays | Author |
| Hydro- | TransIT In | p85α | Acute renal | Ischemia- | Uptake, | Larson et al., |
| dynamic/ | Vivo Gene | | injury | reperfusion | biodistribution | Surgery, (August |
| Lipid | Delivery | | | | | 2007) Vol. |
| | System, | | | | | 142, No. 2, pp. |
| | DOTAP | | | | | (262-269) |
| Hydro- | Lipofectamine | Fas | Acute renal | Ischemia- | Blood urea | Hamar et al., |
| dynamic/ | 2000 | | injury | reperfusion | nitrogen, Fas | Proc Natl Acad |
| Lipid | | | | | Immunohisto- | Sci, (October |
| | | | | | chemistry, | 2004), Vol. 101, |
| | | | | | apoptosis, | No. 41, pp. |
| | | | | | histological | (14883-14888) |
| | | | | | scoring | |
| Hydro- | n.a. | Apoptosis | Acute renal | Ischemia- | n.a. | Zheng et al., |
| dynamic | | cascade | injury | reperfusion | | Am J Pathol, |
| | | elements | | | | (October 2008), |
| | | | | | | Vol. 173, No. 4, |
| | | | | | | pp. (973-980) |
| Hydro- | n.a. | Nuclear | Acute renal | Ischemia- | n.a. | Feng et al., |
| dynamic | | factor | injury | reperfusion | | Transplantation, |
| | | kappa-b | | | | (May 2009), |
| | | (NFkB) | | | | Vol. 87, No. 9, |
| | | | | | | pp. (1283- |
| | | | | | | 1289) |
| Hydro- | Lipofectamine | Apoptosis, | Acute renal | Ischemia- | Apoptosis | Xie & Guo, Am |
| dynamic/ | 2000 | antagonizing | injury | reperfusion | oxidative | Soc Nephrol, |
| Viral | | transcription | | | stress, caspase | (December 2006), |
| | | factor | | | activation, | Vol. 17, No. 12, |
| | | (AATF) | | | membrane | pp. (3336- |
| | | | | | lipid | 3346) |
| | | | | | peroxidation | |
| Hydro- | pBAsi mU6 | Gremlin | Diabetic | Streptozoto | Proteinuria, | Q. Zhang et al., |
| dynamic | Neo/TransIT- | | nephropathy | zin- | serum | PloS ONE, (July |
| | EE | | | induced | creatinine, | 2010), Vol. 5, |
| | Hydrodynamic | | | diabetes | glomerular and | No. 7, e11709, |
| | Delivery | | | | tubular | pp. (1-13) |
| | System | | | | diameter, | |
| | | | | | collagen type | |
| | | | | | IV/BMP7 | |
| | | | | | expression | |
| Viral/Lipid | pSUPER | TGF-β type | Interstitial | Unilateral | α-SMA | Kushibikia et |
| | vector/Lipofect | II receptor | renal | urethral | expression, | al. J Controlled |
| | amine | | fibrosis | obstruction | collagen | Release, (July |
| | | | | | content, | 2005), Vol. |
| | | | | | | 105, No. 3, pp. |
| | | | | | | (318-331) |
| Viral | Adeno- | Mineral | Hyper- | Cold- | blood pressure, | Wang et al., |
| | associated | corticoid | tension | induced | serum albumin, | Gene Therapy, |
| | virus-2 | receptor | caused | hypertension | serum urea | (July 2006), Vol. |
| | | | renal | | nitrogen, serum | 13, No. 14, pp. |
| | | | damage | | creatinine, | (1097-1103) |
| | | | | | kidney weight, | |
| | | | | | urinary sodium | |
| Hydro- | pU6 vector | Luciferase | n.a. | n.a. | uptake | Kobayashi et |
| dynamic/ | | | | | | al., Journal of |
| Viral | | | | | | Pharmacology |
| | | | | | | and |
| | | | | | | Experimental |
| | | | | | | Therapeutics, |
| | | | | | | (February 2004), |
| | | | | | | Vol. 308, No. 2, |
| | | | | | | pp. (688-693) |
| Lipid | Lipoproteins, | apoB1, | n.a. | n.a. | Uptake, | Wolfrum et al., |
| | albumin | apoM | | | binding affinity | Nature |
| | | | | | to lipoproteins | Biotechnology, |
| | | | | | and albumin | (September 2007), |
| | | | | | | Vol. 25, No. 10, |
| | | | | | | pp. (1149-1157) |
| Lipid | Lipofectamine | p53 | Acute renal | Ischemic | Histological | Molitoris et al., |
| | 2000 | | injury | and | scoring, | J Am Soc |
| | | | | cisplatin- | apoptosis | Nephrol, (August |
| | | | | induced | | 2009), Vol. 20, |
| | | | | acute | | No. 8, |
| | | | | injury | | pp. (1754-1764) |
| Lipid | DOTAP/DOPE, | COX-2 | Breast | MDA-MB- | Cell viability, | Mikhaylova et al., |
| | DOTAP/ | | adeno- | 231 breast | uptake | Cancer Gene |
| | DOPE/DOPE- | | carcinoma | cancer | | Therapy, (March |
| | PEG2000 | | | xenograft- | | 2011), Vol. 16, |
| | | | | bearing | | No. 3, pp. (217- |
| | | | | mouse | | 226) |
| Lipid | Cholesterol | 12/15- | Diabetic | Streptozotocin- | Albuminuria, | Yuan et al., Am |
| | | lipoxygenase | nephro- | induced | urinary | J Physiol Renal |
| | | | pathy | diabetes | creatinine, | Physiol (June |
| | | | | | histology, type | 2008), Vol. |
| | | | | | I and IV | 295, pp. (F605- |
| | | | | | collagen, TGF- | F617) |
| | | | | | β, fibronectin, | |
| | | | | | plasminogen | |
| | | | | | activator | |
| | | | | | inhibitor 1 | |
| Lipid | Lipofectamine | Mitochondrial | Diabetic | Streptozoto | Cell | Y. Zhang et al., |
| | 2000 | membrane | nephro- | cin- | proliferation | J Am Soc |
| | | 44 (TIM44) | pathy | induced | and apoptosis, | Nephrol, (April |
| | | | | diabetes | histology, | 2006), Vol. 17, |
| | | | | | ROS, | No. 4, pp. |
| | | | | | mitochondrial | (1090-1101) |
| | | | | | import of Mn- | |
| | | | | | SOD and | |
| | | | | | glutathione | |
| | | | | | peroxidase, | |
| | | | | | cellular | |
| | | | | | membrane | |
| | | | | | polarization | |
| Hydro- | Proteolipo- | RLIP76 | Renal | Caki-2 | uptake | Singhal et al., |
| dynamic/ | some | | carcinoma | kidney | | Cancer Res, |
| Lipid | | | | cancer | | (May 2009), |
| | | | | xenograft- | | Vol. 69, No. 10, |
| | | | | bearing | | pp. (4244-4251) |
| | | | | mouse | | |
| Polymer | PEGylated PEI | Luciferase | n.a. | n.a. | Uptake, | Malek et al., |
| | | pGL3 | | | biodistribution, | Toxicology and |
| | | | | | erythrocyte | Applied |
| | | | | | aggregation | Pharmacology, |
| | | | | | | (April 2009), |
| | | | | | | Vol. 236, No. 1, |
| | | | | | | pp. (97-108) |
| Polymer | PEGylated | MAPK1 | Lupus | Glomerulo- | Proteinuria, | Shimizu et al., J |
| | poly-L-lysine | | glomerulo- | nephritis | glomerulo- | Am Soc |
| | | | nephritis | | sclerosis, TGF- | Nephrology, |
| | | | | | β, fibronectin | (Apr 2010), |
| | | | | | plasminogen | Vol. 21, No. 4, |
| | | | | | activator | pp. (622-633) |
| | | | | | inhibitor 1 | |
| Polymer/ | Hyaluronic | VEGF | Kidney | B16F1 | Biodistribution, | Jiang et al., |
| Nano | acid/Quantum | | cancer/ | melanoma | citotoxicity, | Molecular |
| particle | dot/PEI | | melanoma | tumor- | tumor volume, | Pharmaceutics, |
| | | | | bearing | endocytosis | (May-June |
| | | | | mouse | | 2009), Vol. 6, |
| | | | | | | No. 3, pp. (727- |
| | | | | | | 737) |
| Polymer/ | PEGylated | GAPDH | n.a. | n.a. | cell viability, | Cao et al, J |
| Nano | polycapro- | | | | uptake | Controlled |
| particle | lactone | | | | | Release, (June |
| | nanofiber | | | | | 2010), Vol. |
| | | | | | | 144, No. 2, pp. |
| | | | | | | (203-212) |
| Aptamer | Spiegelmer | CC | Glomerulo | Uninephre | urinary | Ninichuk et al., |
| | mNOX-E36 | chemokine | sclerosis | cto-mized | albumin, | Am J Pathol, |
| | | ligand 2 | | mouse | urinary | (March 2008), |
| | | | | | creatinine, | Vol. 172, No. 3, |
| | | | | | histopathology, | pp. (628-637) |
| | | | | | glomerular | |
| | | | | | filtration rate, | |
| | | | | | macrophage | |
| | | | | | count, serum | |
| | | | | | Ccl2, Mac- 2+, | |
| | | | | | Ki-67+ | |
| Aptamer | Aptamer | vasopressin | Congestive | n.a. | Binding | Purschke et al., |
| | NOX-F37 | (AVP) | heart | | affinity to D- | Proc Natl Acad |
| | | | failure | | AVP, | Sci, (March |
| | | | | | Inhibition of | 2006), Vol. |
| | | | | | AVP | 103, No. 13, pp. |
| | | | | | Signaling, | (5173-5178) |
| | | | | | Urine | |
| | | | | | osmolality and | |
| | | | | | sodium | |
| | | | | | concentration, | |

### Targeting the Liver or Liver Cells

[1456] Targeting liver cells is provided. This may be in vitro or in vivo. Hepatocytes are preferred. Delivery of the CRISPR protein, such as Cpf1 herein may be via viral vectors, especially AAV (and in particular AAV2/6) vectors. These may be administered by intravenous injection.

[1457] A preferred target for liver, whether in vitro or in vivo, is the albumin gene. This is a so-called ‘safe harbor” as albumin is expressed at very high levels and so some reduction in the production of albumin following successful gene editing is tolerated. It is also preferred as the high levels of expression seen from the albumin promoter/enhancer allows for useful levels of correct or transgene production (from the inserted donor template) to be achieved even if only a small fraction of hepatocytes are edited.

[1458] Intron 1 of albumin has been shown by Wechsler et al. (reported at the 57th Annual Meeting and Exposition of the American Society of Hematology—abstract available online at https://ash.confex.com/ash/2015/webprogram/Paper86495.html and presented on 6 Dec. 2015) to be a suitable target site. Their work used Zn Fingers to cut the DNA at this target site, and suitable guide sequences can be generated to guide cleavage at the same site by a CRISPR protein.

[1459] The use of targets within highly-expressed genes (genes with highly active enhancers/promoters) such as albumin may also allow a promoterless donor template to be used, as reported by Wechsler et al. and this is also broadly applicable outside liver targeting. Other examples of highly-expressed genes are known.

### Liver-Associated Blood Disorders, Especially Hemophilia and in Particular Hemophilia B

[1460] Successful gene editing of hepatocytes has been achieved in mice (both in vitro and in vivo) and in non-human primates (in vivo), showing that treatment of blood disorders through gene editing/genome engineering in hepatocytes is feasible. In particular, expression of the human F9 (hF9) gene in hepatocytes has been shown in non-human primates indicating a treatment for Hemophillia B in humans.

[1461] Wechsler et al. reported at the 57th Annual Meeting and Exposition of the American Society of Hematology (abstract presented 6th December 2015 and available online at https://ash.confex.com/ash/2015/webprogram/Paper86495.html) that they has successfully expressed human F9 (hF9) from hepatocytes in non-human primates through in vivo gene editing. This was achieved using 1) two zinc finger nucleases (ZFNs) targeting intron 1 of the albumin locus, and 2) a human F9 donor template construct. The ZFNs and donor template were encoded on separate hepatotropic adeno-associated virus serotype 2/6 (AAV2/6) vectors injected intravenously, resulting in targeted insertion of a corrected copy of the hF9 gene into the albumin locus in a proportion of liver hepatocytes.

[1462] The albumin locus was selected as a “safe harbor” as production of this most abundant plasma protein exceeds 10 g/day, and moderate reductions in those levels are well-tolerated. Genome edited hepatocytes produced normal hFIX (hF9) in therapeutic quantities, rather than albumin, driven by the highly active albumin enhancer/promoter. Targeted integration of the hF9 transgene at the albumin locus and splicing of this gene into the albumin transcript was shown.

[1463] Mice studies: C57BL/6 mice were administered vehicle (n=20) or AAV2/6 vectors (n=25) encoding mouse surrogate reagents at 1.0×1013 vector genome (vg)/kg via tail vein injection. ELISA analysis of plasma hFIX in the treated mice showed peak levels of 50-1053 ng/mL that were sustained for the duration of the 6-month study. Analysis of FIX activity from mouse plasma confirmed bioactivity commensurate with expression levels.

[1464] Non-human primate (NHP) studies: a single intravenous co-infusion of AAV2/6 vectors encoding the NHP targeted albumin-specific ZFNs and a human F9 donor at 1.2×1013 vg/kg (n=5/group) resulted in >50 ng/mL (>1% of normal) in this large animal model. The use of higher AAV2/6 doses (up to 1.5×1014 vg/kg) yielded plasma hFIX levels up to 1000 ng/ml (or 20% of normal) in several animals and up to 2000 ng/ml (or 50% of normal) in a single animal, for the duration of the study (3 months).

[1465] The treatment was well tolerated in mice and NHPs, with no significant toxicological findings related to AAV2/6 ZFN+donor treatment in either species at therapeutic doses. Sangamo (CA, USA) has since applied to the FDA, and been granted, permission to conduct the world's first human clinical trial for an in vivo genome editing application. This follows on the back of the EMEA's approval of the Glybera gene therapy treatment of lipoprotein lipase deficiency.

[1466] Accordingly, it is preferred, in some embodiments, that any or all of the following are used:
[1467] AAV (especially AAV2/6) vectors, preferably administered by intravenous injection;
[1468] Albumin as target for gene editing/insertion of transgene/template—especially at intron 1 of albumin;
[1469] human F9 donor template; and/or
[1470] a promoterless donor template.

### Hemophilia B

[1471] Accordingly, in some embodiments, it is preferred that the present invention is used to treat Hemophilia B. As such it is preferred that a template is provided and that this is the human F9 gene. It will be appreciated that the hF9 template comprises the wt or ‘correct’ version of hF9 so that the treatment is effective.

[1472] In an alternative embodiment, the hemophilia B version of F9 may be delivered so as to create a model organism, cell or cell line (for example a murine or non-human primate model organism, cell or cell line), the model organism, cell or cell line having or carrying the Hemophilia B phenotype, i.e. an inability to produce wt F9.

### Hemophilia A

[1473] In some embodiments, the F9 (factor IX) gene may be replaced by the F8 (factor VIII) gene described above, leading to treatment of Hemophilia A (through provision of a correct F8 gene) and/or creation of a Hemophilia A model organism, cell or cell line (through provision of an incorrect, Hemophilia A version of the F8 gene).

### Hemophilia C

[1474] In some embodiments, the F9 (factor IX) gene may be replaced by the F11 (factor XI) gene described above, leading to treatment of Hemophilia C (through provision of a correct F11 gene) and/or creation of a Hemophilia C model organism, cell or cell line (through provision of an incorrect, Hemophilia C version of the F11 gene).

### Treating Epithelial and Lung Diseases

[1475] The present invention also contemplates delivering the CRISPR-Cas system described herein, e.g. Cpf1 effector protein systems, to one or both lungs.

[1476] Although AAV-2-based vectors were originally proposed for CFTR delivery to CF airways, other serotypes such as AAV-1, AAV-5, AAV-6, and AAV-9 exhibit improved gene transfer efficiency in a variety of models of the lung epithelium (see, e.g., Li et al., Molecular Therapy, vol. 17 no. 12, 2067-277 December 2009). AAV-1 was demonstrated to be ˜100-fold more efficient than AAV-2 and AAV-5 at transducing human airway epithelial cells in vitro, 5 although AAV-1 transduced murine tracheal airway epithelia in vivo with an efficiency equal to that of AAV-5. Other studies have shown that AAV-5 is 50-fold more efficient than AAV-2 at gene delivery to human airway epithelium (HAE) in vitro and significantly more efficient in the mouse lung airway epithelium in vivo. AAV-6 has also been shown to be more efficient than AAV-2 in human airway epithelial cells in vitro and murine airways in vivo.8 The more recent isolate, AAV-9, was shown to display greater gene transfer efficiency than AAV-5 in murine nasal and alveolar epithelia in vivo with gene expression detected for over 9 months suggesting AAV may enable long-term gene expression in vivo, a desirable property for a CFTR gene delivery vector. Furthermore, it was demonstrated that AAV-9 could be readministered to the murine lung with no loss of CFTR expression and minimal immune consequences. CF and non-CF HAE cultures may be inoculated on the apical surface with 100 μl of AAV vectors for hours (see, e.g., Li et al., Molecular Therapy, vol. 17 no. 12, 2067-277 December 2009). The MOI may vary from 1×10³ to 4×10⁵ vector genomes/cell, depending on virus concentration and purposes of the experiments. The above cited vectors are contemplated for the delivery and/or administration of the invention.

[1477] Zamora et al. (Am J Respir Crit Care Med Vol 183. pp 531-538, 2011) reported an example of the application of an RNA interference therapeutic to the treatment of human infectious disease and also a randomized trial of an antiviral drug in respiratory syncytial virus (RSV)-infected lung transplant recipients. Zamora et al. performed a randomized, double-blind, placebo controlled trial in LTX recipients with RSV respiratory tract infection. Patients were permitted to receive standard of care for RSV. Aerosolized ALN-RSV01 (0.6 mg/kg) or placebo was administered daily for 3 days. This study demonstrates that an RNAi therapeutic targeting RSV can be safely administered to LTX recipients with RSV infection. Three daily doses of ALN-RSV01 did not result in any exacerbation of respiratory tract symptoms or impairment of lung function and did not exhibit any systemic proinflammatory effects, such as induction of cytokines or CRP. Pharmacokinetics showed only low, transient systemic exposure after inhalation, consistent with preclinical animal data showing that ALN-RSV01, administered intravenously or by inhalation, is rapidly cleared from the circulation through exonuclease mediated digestion and renal excretion. The method of Zamora et al. may be applied to the nucleic acid-targeting system of the present invention and an aerosolized CRISPR Cas, for example with a dosage of 0.6 mg/kg, may be contemplated for the present invention.

[1478] Subjects treated for a lung disease may for example receive pharmaceutically effective amount of aerosolized AAV vector system per lung endobronchially delivered while spontaneously breathing. As such, aerosolized delivery is preferred for AAV delivery in general. An adenovirus or an AAV particle may be used for delivery. Suitable gene constructs, each operably linked to one or more regulatory sequences, may be cloned into the delivery vector. In this instance, the following constructs are provided as examples: Cbh or EF1a promoter for Cas (Cpf1), U6 or H1 promoter for guide RNA): A preferred arrangement is to use a CFTRdelta508 targeting guide, a repair template for deltaF508 mutation and a codon optimized Cpf1 enzyme, with optionally one or more nuclear localization signal or sequence(s) (NLS(s)), e.g., two (2) NLSs. Constructs without NLS are also envisaged.

### Treating Diseases of the Muscular System

[1479] The present invention also contemplates delivering the CRISPR-Cas system described herein, e.g. Cpf1 effector protein systems, to muscle(s).

[1480] Bortolanza et al. (Molecular Therapy vol. 19 no. 11, 2055-264 November 2011) shows that systemic delivery of RNA interference expression cassettes in the FRG1 mouse, after the onset of facioscapulohumeral muscular dystrophy (FSHD), led to a dose-dependent long-term FRG1 knockdown without signs of toxicity. Bortolanza et al. found that a single intravenous injection of 5×10¹² vg of rAAV6-sh1FRG1 rescues muscle histopathology and muscle function of FRG1 mice. In detail, 200 μl containing 2×10¹² or 5×10¹² vg of vector in physiological solution were injected into the tail vein using a 25-gauge Terumo syringe. The method of Bortolanza et al. may be applied to an AAV expressing CRISPR Cas and injected into humans at a dosage of about 2×10¹⁵ or 2×10¹⁶ vg of vector.

[1481] Dumonceaux et al. (Molecular Therapy vol. 18 no. 5, 881-887 May 2010) inhibit the myostatin pathway using the technique of RNA interference directed against the myostatin receptor AcvRIIb mRNA (sh-AcvRIIb). The restoration of a quasi-dystrophin was mediated by the vectorized U7 exon-skipping technique (U7-DYS). Adeno-associated vectors carrying either the sh-AcvrIIb construct alone, the U7-DYS construct alone, or a combination of both constructs were injected in the tibialis anterior (TA) muscle of dystrophic mdx mice. The injections were performed with 10¹¹ AAV viral genomes. The method of Dumonceaux et al. may be applied to an AAV expressing CRISPR Cas and injected into humans, for example, at a dosage of about 10¹⁴ to about 10¹⁵ vg of vector.

[1482] Kinouchi et al. (Gene Therapy (2008) 15, 1126-1130) report the effectiveness of in vivo siRNA delivery into skeletal muscles of normal or diseased mice through nanoparticle formation of chemically unmodified siRNAs with atelocollagen (ATCOL). ATCOL-mediated local application of siRNA targeting myostatin, a negative regulator of skeletal muscle growth, in mouse skeletal muscles or intravenously, caused a marked increase in the muscle mass within a few weeks after application. These results imply that ATCOL-mediated application of siRNAs is a powerful tool for future therapeutic use for diseases including muscular atrophy. MstsiRNAs (final concentration, 10 mM) were mixed with ATCOL (final concentration for local administration, 0.5%) (AteloGene, Kohken, Tokyo, Japan) according to the manufacturer's instructions. After anesthesia of mice (20-week-old male C57BL/6) by Nembutal (25 mg/kg, i.p.), the Mst-siRNA/ATCOL complex was injected into the masseter and biceps femoris muscles. The method of Kinouchi et al. may be applied to CRISPR Cas and injected into a human, for example, at a dosage of about 500 to 1000 ml of a 40 μM solution into the muscle. Hagstrom et al. (Molecular Therapy Vol. 10, No. 2, August 2004) describe an intravascular, nonviral methodology that enables efficient and repeatable delivery of nucleic acids to muscle cells (myofibers) throughout the limb muscles of mammals. The procedure involves the injection of naked plasmid DNA or siRNA into a distal vein of a limb that is transiently isolated by a tourniquet or blood pressure cuff. Nucleic acid delivery to myofibers is facilitated by its rapid injection in sufficient volume to enable extravasation of the nucleic acid solution into muscle tissue. High levels of transgene expression in skeletal muscle were achieved in both small and large animals with minimal toxicity. Evidence of siRNA delivery to limb muscle was also obtained. For plasmid DNA intravenous injection into a rhesus monkey, a threeway stopcock was connected to two syringe pumps (Model PHD 2000; Harvard Instruments), each loaded with a single syringe. Five minutes after a papaverine injection, pDNA (15.5 to 25.7 mg in 40-100 ml saline) was injected at a rate of 1.7 or 2.0 ml/s. This could be scaled up for plasmid DNA expressing CRISPR Cas of the present invention with an injection of about 300 to 500 mg in 800 to 2000 ml saline for a human. For adenoviral vector injections into a rat, 2×10⁹ infectious particles were injected in 3 ml of normal saline solution (NSS). This could be scaled up for an adenoviral vector expressing CRISPR Cas of the present invention with an injection of about 1×10¹³ infectious particles were injected in 10 liters of NSS for a human. For siRNA, a rat was injected into the great saphenous vein with 12.5 μg of a siRNA and a primate was injected into the great saphenous vein with 750 μg of a siRNA. This could be scaled up for a CRISPR Cas of the present invention, for example, with an injection of about 15 to about 50 mg into the great saphenous vein of a human.

[1483] See also, for example, WO2013163628 A2, Genetic Correction of Mutated Genes, published application of Duke University describes efforts to correct, for example, a frameshift mutation which causes a premature stop codon and a truncated gene product that can be corrected via nuclease mediated non-homologous end joining such as those responsible for Duchenne Muscular Dystrophy, (“DMD”) a recessive, fatal, X-linked disorder that results in muscle degeneration due to mutations in the dystrophin gene. The majority of dystrophin mutations that cause DMD are deletions of exons that disrupt the reading frame and cause premature translation termination in the dystrophin gene. Dystrophin is a cytoplasmic protein that provides structural stability to the dystroglycan complex of the cell membrane that is responsible for regulating muscle cell integrity and function. The dystrophin gene or “DMD gene” as used interchangeably herein is 2.2 megabases at locus Xp21. The primary transcription measures about 2,400 kb with the mature mRNA being about 14 kb. 79 exons code for the protein which is over 3500 amino acids. Exon 51 is frequently adjacent to frame-disrupting deletions in DMD patients and has been targeted in clinical trials for oligonucleotide-based exon skipping. A clinical trial for the exon 51 skipping compound eteplirsen recently reported a significant functional benefit across 48 weeks, with an average of 47% dystrophin positive fibers compared to baseline. Mutations in exon 51 are ideally suited for permanent correction by NHEJ-based genome editing.

[1484] The methods of US Patent Publication No. 20130145487 assigned to Cellectis, which relates to meganuclease variants to cleave a target sequence from the human dystrophin gene (DMD), may also be modified to for the nucleic acid-targeting system of the present invention.

### Treating Diseases of the Skin

[1485] The present invention also contemplates delivering the CRISPR-Cas system described herein, e.g. Cpf1 effector protein systems, to the skin.

[1486] Hickerson et al. (Molecular Therapy—Nucleic Acids (2013) 2, e129) relates to a motorized microneedle array skin delivery device for delivering self-delivery (sd)-siRNA to human and murine skin. The primary challenge to translating siRNA-based skin therapeutics to the clinic is the development of effective delivery systems. Substantial effort has been invested in a variety of skin delivery technologies with limited success. In a clinical study in which skin was treated with siRNA, the exquisite pain associated with the hypodermic needle injection precluded enrollment of additional patients in the trial, highlighting the need for improved, more “patient-friendly” (i.e., little or no pain) delivery approaches. Microneedles represent an efficient way to deliver large charged cargos including siRNAs across the primary barrier, the stratum corneum, and are generally regarded as less painful than conventional hypodermic needles. Motorized “stamp type” microneedle devices, including the motorized microneedle array (MMNA) device used by Hickerson et al., have been shown to be safe in hairless mice studies and cause little or no pain as evidenced by (i) widespread use in the cosmetic industry and (ii) limited testing in which nearly all volunteers found use of the device to be much less painful than a flushot, suggesting siRNA delivery using this device will result in much less pain than was experienced in the previous clinical trial using hypodermic needle injections. The MMNA device (marketed as Triple-M or Tri-M by Bomtech Electronic Co, Seoul, South Korea) was adapted for delivery of siRNA to mouse and human skin. sd-siRNA solution (up to 300 μl of 0.1 mg/ml RNA) was introduced into the chamber of the disposable Tri-M needle cartridge (Bomtech), which was set to a depth of 0.1 mm. For treating human skin, deidentified skin (obtained immediately following surgical procedures) was manually stretched and pinned to a cork platform before treatment. All intradermal injections were performed using an insulin syringe with a 28-gauge 0.5-inch needle. The MMNA device and method of Hickerson et al. could be used and/or adapted to deliver the CRISPR Cas of the present invention, for example, at a dosage of up to 300 μl of 0.1 mg/ml CRISPR Cas to the skin.

[1487] Leachman et al. (Molecular Therapy, vol. 18 no. 2, 442-446 February 2010) relates to a phase Ib clinical trial for treatment of a rare skin disorder pachyonychia congenita (PC), an autosomal dominant syndrome that includes a disabling plantar keratoderma, utilizing the first short-interfering RNA (siRNA)-based therapeutic for skin. This siRNA, called TD101, specifically and potently targets the keratin 6a (K6a) N171K mutant mRNA without affecting wild-type K6a mRNA.

[1488] Zheng et al. (PNAS, Jul. 24, 2012, vol. 109, no. 30, 11975-11980) show that spherical nucleic acid nanoparticle conjugates (SNA-NCs), gold cores surrounded by a dense shell of highly oriented, covalently immobilized siRNA, freely penetrate almost 100% of keratinocytes in vitro, mouse skin, and human epidermis within hours after application. Zheng et al. demonstrated that a single application of 25 nM epidermal growth factor receptor (EGFR) SNA-NCs for 60 h demonstrate effective gene knockdown in human skin. A similar dosage may be contemplated for CRISPR Cas immobilized in SNA-NCs for administration to the skin.

### Cancer

[1489] In some embodiments, the treatment, prophylaxis or diagnosis of cancer is provided. The target is preferably one or more of the FAS, BID, CTLA4, PDCD1, CBLB, PTPN6, TRAC or TRBC genes. The cancer may be one or more of lymphoma, chronic lymphocytic leukemia (CLL), B cell acute lymphocytic leukemia (B-ALL), acute lymphoblastic leukemia, acute myeloid leukemia, non-Hodgkin's lymphoma (NHL), diffuse large cell lymphoma (DLCL), multiple myeloma, renal cell carcinoma (RCC), neuroblastoma, colorectal cancer, breast cancer, ovarian cancer, melanoma, sarcoma, prostate cancer, lung cancer, esophageal cancer, hepatocellular carcinoma, pancreatic cancer, astrocytoma, mesothelioma, head and neck cancer, and medulloblastoma. This may be implemented with engineered chimeric antigen receptor (CAR) T cell. This is described in WO2015161276, the disclosure of which is hereby incorporated by reference and described herein below.

[1490] Target genes suitable for the treatment or prophylaxis of cancer may include, in some embodiments, those described in WO2015048577 the disclosure of which is hereby incorporated by reference.

### Usher Syndrome or Retinitis Pigmentosa-39

[1491] In some embodiments, the treatment, prophylaxis or diagnosis of Usher Syndrome or retinitis pigmentosa-39 is provided. The target is preferably the USH2A gene. In some embodiments, correction of a G deletion at position 2299 (2299delG) is provided. This is described in WO2015134812A1, the disclosure of which is hereby incorporated by reference.

### Cystic Fibrosis (CF)

[1492] In some embodiments, the treatment, prophylaxis or diagnosis of cystic fibrosis is provided. The target is preferably the SCNN1A or the CFTR gene. This is described in WO2015157070, the disclosure of which is hereby incorporated by reference.

[1493] Schwank et al. (Cell Stem Cell, 13:653-58, 2013) used CRISPR-Cas9 to correct a defect associated with cystic fibrosis in human stem cells. The team's target was the gene for an ion channel, cystic fibrosis transmembrane conductor receptor (CFTR). A deletion in CFTR causes the protein to misfold in cystic fibrosis patients. Using cultured intestinal stem cells developed from cell samples from two children with cystic fibrosis, Schwank et al. were able to correct the defect using CRISPR along with a donor plasmid containing the reparative sequence to be inserted. The researchers then grew the cells into intestinal “organoids,” or miniature guts, and showed that they functioned normally. In this case, about half of clonal organoids underwent the proper genetic correction.

### HIV and AIDS

[1494] In some embodiments, the treatment, prophylaxis or diagnosis of HIV and AIDS is provided. The target is preferably the CCR5 gene in HIV. This is described in WO2015148670A1, the disclosure of which is hereby incorporated by reference.

### Beta Thalassaemia

[1495] In some embodiments, the treatment, prophylaxis or diagnosis of Beta Thalassaemia is provided. The target is preferably the BCL11A gene. This is described in WO2015148860, the disclosure of which is hereby incorporated by reference.

### Sickle Cell Disease (SCD)

[1496] In some embodiments, the treatment, prophylaxis or diagnosis of Sickle Cell Disease (SCD) is provided. The target is preferably the HBB or BCL11A gene. This is described in WO2015148863, the disclosure of which is hereby incorporated by reference.

### Herpes Simplex Virus 1 and 2

[1497] In some embodiments, the treatment, prophylaxis or diagnosis of HSV-1 (Herpes Simplex Virus 1) is provided. The target is preferably the UL19, UL30, UL48 or UL50 gene in HSV-1. This is described in WO2015153789, the disclosure of which is hereby incorporated by reference.

[1498] In other embodiments, the treatment, prophylaxis or diagnosis of HSV-2 (Herpes Simplex Virus 2) is provided. The target is preferably the UL19, UL30, UL48 or UL50 gene in HSV-2. This is described in WO2015153791, the disclosure of which is hereby incorporated by reference.

[1499] In some embodiments, the treatment, prophylaxis or diagnosis of Primary Open Angle Glaucoma (POAG) is provided. The target is preferably the MYOC gene. This is described in WO2015153780, the disclosure of which is hereby incorporated by reference.

### Adoptive Cell Therapies

[1500] The present invention also contemplates use of the CRISPR-Cas system described herein, e.g. Cpf1 effector protein systems, to modify cells for adoptive therapies. Aspects of the invention accordingly involve the adoptive transfer of immune system cells, such as T cells, specific for selected antigens, such as tumor associated antigens (see Maus et al., 2014, Adoptive Immunotherapy for Cancer or Viruses, Annual Review of Immunology, Vol. 32: 189-225; Rosenberg and Restifo, 2015, Adoptive cell transfer as personalized immunotherapy for human cancer, Science Vol. 348 no. 6230 pp. 62-68; and, Restifo et al., 2015, Adoptive immunotherapy for cancer: harnessing the T cell response. Nat. Rev. Immunol. 12(4): 269-281). Various strategies may for example be employed to genetically modify T cells by altering the specificity of the T cell receptor (TCR) for example by introducing new TCR α and β chains with selected peptide specificity (see U.S. Pat. No. 8,697,854; PCT Patent Publications: WO2003020763, WO2004033685, WO2004044004, WO2005114215, WO2006000830, WO2008038002, WO2008039818, WO2004074322, WO2005113595, WO2006125962, WO2013166321, WO2013039889, WO2014018863, WO2014083173; U.S. Pat. No. 8,088,379).

[1501] As an alternative to, or addition to, TCR modifications, chimeric antigen receptors (CARs) may be used in order to generate immunoresponsive cells, such as T cells, specific for selected targets, such as malignant cells, with a wide variety of receptor chimera constructs having been described (see U.S. Pat. Nos. 5,843,728; 5,851,828; 5,912,170; 6,004,811; 6,284,240; 6,392,013; 6,410,014; 6,753,162; 8,211,422; and, PCT Publication WO9215322). Alternative CAR constructs may be characterized as belonging to successive generations. First-generation CARs typically consist of a single-chain variable fragment of an antibody specific for an antigen, for example comprising a VL linked to a VH of a specific antibody, linked by a flexible linker, for example by a CD8α hinge domain and a CD8α transmembrane domain, to the transmembrane and intracellular signaling domains of either CD3 or FcRγ (scFv-CD3 or scFv-FcRγ; see U.S. Pat. No. 7,741,465; U.S. Pat. No. 5,912,172; U.S. Pat. No. 5,906,936). Second-generation CARs incorporate the intracellular domains of one or more costimulatory molecules, such as CD28, OX40 (CD134), or 4-1BB (CD137) within the endodomain (for example scFv-CD28/OX40/4-1BB-CD3ζ; see U.S. Pat. Nos. 8,911,993; 8,916,381; 8,975,071; 9,101,584; 9,102,760; 9,102,761). Third-generation CARs include a combination of costimulatory endodomains, such a CD3-chain, CD97, GDI 1a-CD18, CD2, ICOS, CD27, CD154, CDS, OX40, 4-1BB, or CD28 signaling domains (for example scFv-CD28-4-1BB-CD3ζ or scFv-CD28-OX40-CD3ζ; see U.S. Pat. No. 8,906,682; U.S. Pat. No. 8,399,645; U.S. Pat. No. 5,686,281; PCT Publication No. WO2014134165; PCT Publication No. WO2012079000). Alternatively, costimulation may be orchestrated by expressing CARs in antigen-specific T cells, chosen so as to be activated and expanded following engagement of their native αβTCR, for example by antigen on professional antigen-presenting cells, with attendant costimulation. In addition, additional engineered receptors may be provided on the immunoresponsive cells, for example to improve targeting of a T-cell attack and/or minimize side effects.

[1502] Alternative techniques may be used to transform target immunoresponsive cells, such as protoplast fusion, lipofection, transfection or electroporation. A wide variety of vectors may be used, such as retroviral vectors, lentiviral vectors, adenoviral vectors, adeno-associated viral vectors, plasmids or transposons, such as a Sleeping Beauty transposon (see U.S. Pat. Nos. 6,489,458; 7,148,203; 7,160,682; 7,985,739; 8,227,432), may be used to introduce CARs, for example using 2nd generation antigen-specific CARs signaling through CD3ζ and either CD28 or CD137. Viral vectors may for example include vectors based on HIV, SV40, EBV, HSV or BPV.

[1503] Cells that are targeted for transformation may for example include T cells, Natural Killer (NK) cells, cytotoxic T lymphocytes (CTL), regulatory T cells, human embryonic stem cells, tumor-infiltrating lymphocytes (TIL) or a pluripotent stem cell from which lymphoid cells may be differentiated. T cells expressing a desired CAR may for example be selected through co-culture with γ-irradiated activating and propagating cells (AaPC), which co-express the cancer antigen and co-stimulatory molecules. The engineered CAR T-cells may be expanded, for example by co-culture on AaPC in presence of soluble factors, such as IL-2 and IL-21. This expansion may for example be carried out so as to provide memory CAR+ T cells (which may for example be assayed by non-enzymatic digital array and/or multi-panel flow cytometry). In this way, CAR T cells may be provided that have specific cytotoxic activity against antigen-bearing tumors (optionally in conjunction with production of desired chemokines such as interferon-γ). CAR T cells of this kind may for example be used in animal models, for example to threat tumor xenografts.

[1504] Approaches such as the foregoing may be adapted to provide methods of treating and/or increasing survival of a subject having a disease, such as a neoplasia, for example by administering an effective amount of an immunoresponsive cell comprising an antigen recognizing receptor that binds a selected antigen, wherein the binding activates the immunoreponsive cell, thereby treating or preventing the disease (such as a neoplasia, a pathogen infection, an autoimmune disorder, or an allogeneic transplant reaction). Dosing in CAR T cell therapies may for example involve administration of from 106 to 109 cells/kg, with or without a course of lymphodepletion, for example with cyclophosphamide.

[1505] To guard against possible adverse reactions, engineered immunoresponsive cells may be equipped with a transgenic safety switch, in the form of a transgene that renders the cells vulnerable to exposure to a specific signal. For example, the herpes simplex viral thymidine kinase (TK) gene may be used in this way, for example by introduction into allogeneic T lymphocytes used as donor lymphocyte infusions following stem cell transplantation. In such cells, administration of a nucleoside prodrug such as ganciclovir or acyclovir causes cell death. Alternative safety switch constructs include inducible caspase 9, for example triggered by administration of a small-molecule dimerizer that brings together two nonfunctional icasp9 molecules to form the active enzyme. A wide variety of alternative approaches to implementing cellular proliferation controls have been described (see U.S. Patent Publication No. 20130071414; PCT Patent Publication WO2011146862; PCT Patent Publication WO2014011987; PCT Patent Publication WO2013040371; Zhou et al. BLOOD, 2014, 123/25:3895-3905; Di Stasi et al., The New England Journal of Medicine 2011; 365:1673-1683; Sadelain M, The New England Journal of Medicine 2011; 365:1735-173; Ramos et al., Stem Cells 28(6):1107-15 (2010)).

[1506] In a further refinement of adoptive therapies, genome editing with a CRISPR-Cas system as described herein may be used to tailor immunoresponsive cells to alternative implementations, for example providing edited CAR T cells (see Poirot et al., 2015, Multiplex genome edited T-cell manufacturing platform for “off-the-shelf” adoptive T-cell immunotherapies, Cancer Res 75 (18): 3853). For example, immunoresponsive cells may be edited to delete expression of some or all of the class of HLA type II and/or type I molecules, or to knockout selected genes that may inhibit the desired immune response, such as the PD1 gene.

### Gene Drives

[1507] The present invention also contemplates use of the CRISPR-Cas system described herein, e.g. Cpf1 effector protein systems, to provide RNA-guided gene drives, for example in systems analogous to gene drives described in PCT Patent Publication WO 2015/105928. Systems of this kind may for example provide methods for altering eukaryotic germline cells, by introducing into the germline cell a nucleic acid sequence encoding an RNA-guided DNA nuclease and one or more guide RNAs. The guide RNAs may be designed to be complementary to one or more target locations on genomic DNA of the germline cell. The nucleic acid sequence encoding the RNA guided DNA nuclease and the nucleic acid sequence encoding the guide RNAs may be provided on constructs between flanking sequences, with promoters arranged such that the germline cell may express the RNA guided DNA nuclease and the guide RNAs, together with any desired cargo-encoding sequences that are also situated between the flanking sequences. The flanking sequences will typically include a sequence which is identical to a corresponding sequence on a selected target chromosome, so that the flanking sequences work with the components encoded by the construct to facilitate insertion of the foreign nucleic acid construct sequences into genomic DNA at a target cut site by mechanisms such as homologous recombination, to render the germline cell homozygous for the foreign nucleic acid sequence. In this way, gene-drive systems are capable of introgressing desired cargo genes throughout a breeding population (Gantz et al., 2015, Highly efficient Cas9-mediated gene drive for population modification of the malaria vector mosquito Anopheles stephensi, PNAS 2015, published ahead of print Nov. 23, 2015, doi:10.1073/pnas.1521077112; Esvelt et al., 2014, Concerning RNA-guided gene drives for the alteration of wild populations eLife 2014; 3:e03401). In select embodiments, target sequences may be selected which have few potential off-target sites in a genome. Targeting multiple sites within a target locus, using multiple guide RNAs, may increase the cutting frequency and hinder the evolution of drive resistant alleles. Truncated guide RNAs may reduce off-target cutting. Paired nickases may be used instead of a single nuclease, to further increase specificity. Gene drive constructs may include cargo sequences encoding transcriptional regulators, for example to activate homologous recombination genes and/or repress non-homologous end-joining. Target sites may be chosen within an essential gene, so that non-homologous end-joining events may cause lethality rather than creating a drive-resistant allele. The gene drive constructs can be engineered to function in a range of hosts at a range of temperatures (Cho et al. 2013, Rapid and Tunable Control of Protein Stability in Caenorhabditis elegans Using a Small Molecule, PLoS ONE 8(8): e72393. doi:10.1371/journal.pone.0072393).

### Xenotransplantation

[1508] The present invention also contemplates use of the CRISPR-Cas system described herein, e.g. Cpf1 effector protein systems, to provide RNA-guided DNA nucleases adapted to be used to provide modified tissues for transplantation. For example, RNA-guided DNA nucleases may be used to knockout, knockdown or disrupt selected genes in an animal, such as a transgenic pig (such as the human heme oxygenase-1 transgenic pig line), for example by disrupting expression of genes that encode epitopes recognized by the human immune system, i.e. xenoantigen genes. Candidate porcine genes for disruption may for example include α(1,3)-galactosyltransferase and cytidine monophosphate-N-acetylneuraminic acid hydroxylase genes (see PCT Patent Publication WO 2014/066505). In addition, genes encoding endogenous retroviruses may be disrupted, for example the genes encoding all porcine endogenous retroviruses (see Yang et al., 2015, Genome-wide inactivation of porcine endogenous retroviruses (PERVs), Science 27 Nov. 2015: Vol. 350 no. 6264 pp. 1101-1104). In addition, RNA-guided DNA nucleases may be used to target a site for integration of additional genes in xenotransplant donor animals, such as a human CD55 gene to improve protection against hyperacute rejection.

### General Gene Therapy Considerations

[1509] Examples of disease-associated genes and polynucleotides amd disease specific information is available from McKusick-Nathans Institute of Genetic Medicine, Johns Hopkins University (Baltimore, Md.) and National Center for Biotechnology Information, National Library of Medicine (Bethesda, Md.), available on the World Wide Web.

[1510] Mutations in these genes and pathways can result in production of improper proteins or proteins in improper amounts which affect function. Further examples of genes, diseases and proteins are hereby incorporated by reference from U.S. Provisional application 61/736,527 filed Dec. 12, 2012. Such genes, proteins and pathways may be the target polynucleotide of a CRISPR complex of the present invention. Examples of disease-associated genes and polynucleotides are listed in Tables A and B. Examples of signaling biochemical pathway-associated genes and polynucleotides are listed in Table C.

TABLE A

| DISEASE/DISORDERS | GENE(S) |
|---|---|
| Neoplasia | PTEN; ATM; ATR; EGFR; ERBB2; ERBB3; ERBB4; |
| | Notch1; Notch2; Notch3; Notch4; AKT; AKT2; AKT3; HIF; |
| | HIF1a; HIF3a; Met; HRG; Bcl2; PPAR alpha; PPAR |
| | gamma; WT1 (Wilms Tumor); FGF Receptor Family |
| | members (5 members: 1, 2, 3, 4, 5); CDKN2a; APC; RB |
| | (retinoblastoma); MEN1; VHL; BRCA1; BRCA2; AR |
| | (Androgen Receptor); TSG101; IGF; IGF Receptor; Igf1 (4 |
| | variants); Igf2 (3 variants); Igf 1 Receptor; Igf 2 Receptor; |
| | Bax; Bcl2; caspases family (9 members: |
| | 1, 2, 3, 4, 6, 7, 8, 9, 12); Kras; Apc |
| Age-related Macular | Abcr; Ccl2; Cc2; cp (ceruloplasmin); Timp3; cathepsinD; |
| Degeneration | Vldlr; Ccr2 |
| Schizophrenia | Neuregulin1 (Nrg1); Erb4 (receptor for Neuregulin); |
| | Complexin1 (Cplx1); Tph1 Tryptophan hydroxylase; Tph2 |
| | Tryptophan hydroxylase 2; Neurexin 1; GSK3; GSK3a; |
| | GSK3b |
| Disorders | 5-HTT (Slc6a4); COMT; DRD (Drd1a); SLC6A3; DAOA; |
| | DTNBP1; Dao (Dao1) |
| Trinucleotide Repeat | HTT (Huntington's Dx); SBMA/SMAX1/AR (Kennedy's |
| Disorders | Dx); FXN/X25 (Friedrich's Ataxia); ATX3 (Machado- |
| | Joseph's Dx); ATXN1 and ATXN2 (spinocerebellar |
| | ataxias); DMPK (myotonic dystrophy); Atrophin-1 and Atn1 |
| | (DRPLA Dx); CBP (Creb-BP - global instability); VLDLR |
| | (Alzheimer's); Atxn7; Atxn10 |
| Fragile X Syndrome | FMR2; FXR1; FXR2; mGLUR5 |
| Secretase Related | APH-1 (alpha and beta); Presenilin (Psen1); nicastrin |
| Disorders | (Ncstn); PEN-2 |
| Others | Nos1; Parp1; Nat1; Nat2 |
| Prion - related disorders | Prp |
| ALS | SOD1; ALS2; STEX; FUS; TARDBP; VEGF (VEGF-a; |
| | VEGF-b; VEGF-c) |
| Drug addiction | Prkce (alcohol); Drd2; Drd4; ABAT (alcohol); GRIA2; |
| | Grm5; Grin1; Htr1b; Grin2a; Drd3; Pdyn; Gria1 (alcohol) |
| Autism | Mecp2; BZRAP1; MDGA2; Sema5A; Neurexin 1; Fragile X |
| | (FMR2 (AFF2); FXR1; FXR2; Mglur5) |
| Alzheimer's Disease | E1; CHIP; UCH; UBB; Tau; LRP; PICALM; Clusterin; PS1; |
| | SORL1; CR1; Vldlr; Uba1; Uba3; CHIP28 (Aqp1, |
| | Aquaporin 1); Uchl1; Uchl3; APP |
| Inflammation | IL-10; IL-1 (IL-1a; IL-1b); IL-13; IL-17 (IL-17a (CTLA8); IL- |
| | 17b; IL-17c; IL-17d; IL-17f); II-23; Cx3cr1; ptpn22; TNFa; |
| | NOD2/CARD15 for IBD; IL-6; IL-12 (IL-12a; IL-12b); |
| | CTLA4; Cx3cl1 |
| Parkinson's Disease | x-Synuclein; DJ-1; LRRK2; Parkin; PINK1 |

TABLE B

| | |
|---|---|
| Blood and | Anemia (CDAN1, CDA1, RPS19, DBA, PKLR, PK1, NT5C3, UMPH1, |
| coagulation diseases | PSN1, RHAG, RH50A, NRAMP2, SPTB, ALAS2, ANH1, ASB, |
| and disorders | ABCB7, ABC7, ASAT); Bare lymphocyte syndrome (TAPBP, TPSN, |
| | TAP2, ABCB3, PSF2, RING11, MHC2TA, C2TA, RFX5, RFXAP, |
| | RFX5), Bleeding disorders (TBXA2R, P2RX1, P2X1); Factor H and |
| | factor H-like 1 (HF1, CFH, HUS); Factor V and factor VIII (MCFD2); |
| | Factor VII deficiency (F7); Factor X deficiency (F10); Factor XI |
| | deficiency (F11); Factor XII deficiency (F12, HAF); Factor XIIIA |
| | deficiency (F13A1, F13A); Factor XIIIB deficiency (F13B); Fanconi |
| | anemia (FANCA, FACA, FA1, FA, FAA, FAAP95, FAAP90, FLJ34064, |
| | FANCB, FANCC, FACC, BRCA2, FANCD1, FANCD2, FANCD, |
| | FACD, FAD, FANCE, FACE, FANCF, XRCC9, FANCG, BRIP1, |
| | BACH1, FANCJ, PHF9, FANCL, FANCM, KIAA1596); |
| | Hemophagocytic lymphohistiocytosis disorders (PRF1, HPLH2, |
| | UNC13D, MUNC13-4, HPLH3, HLH3, FHL3); Hemophilia A (F8, F8C, |
| | HEMA); Hemophilia B (F9, HEMB), Hemorrhagic disorders (PI, ATT, |
| | F5); Leukocyde deficiencies and disorders (ITGB2, CD18, LCAMB, |
| | LAD, EIF2B1, EIF2BA, EIF2B2, EIF2B3, EIF2B5, LVWM, CACH, |
| | CLE, EIF2B4); Sickle cell anemia (HBB); Thalassemia (HBA2, HBB, |
| | HBD, LCRB, HBA1). |
| Cell dysregulation | B-cell non-Hodgkin lymphoma (BCL7A, BCL7); Leukemia (TAL1, |
| and oncology | TCL5, SCL, TAL2, FLT3, NBS1, NBS, ZNFN1A1, IK1, LYF1, |
| diseases and disorders | HOXD4, HOX4B, BCR, CML, PHL, ALL, ARNT, KRAS2, RASK2, |
| | GMPS, AF10, ARHGEF12, LARG, KIAA0382, CALM, CLTH, |
| | CEBPA, CEBP, CHIC2, BTL, FLT3, KIT, PBT, LPP, NPM1, NUP214, |
| | D9S46E, CAN, CAIN, RUNX1, CBFA2, AML1, WHSC1L1, NSD3, |
| | FLT3, AF1Q, NPM1, NUMA1, ZNF145, PLZF, PML, MYL, STAT5B, |
| | AF10, CALM, CLTH, ARL11, ARLTS1, P2RX7, P2X7, BCR, CML, |
| | PHL, ALL, GRAF, NF1, VRNF, WSS, NFNS, PTPN11, PTP2C, SHP2, |
| | NS1, BCL2, CCND1, PRAD1, BCL1, TCRA, GATA1, GF1, ERYF1, |
| | NFE1, ABL1, NQO1, DIA4, NMOR1, NUP214, D9S46E, CAN, CAIN). |
| Inflammation and | AIDS (KIR3DL1, NKAT3, NKB1, AMB11, KIR3DS1, IFNG, CXCL12, |
| immune related | SDF1); Autoimmune lymphoproliferative syndrome (TNFRSF6, APT1, |
| diseases and disorders | FAS, CD95, ALPS1A); Combined immunodeficiency, (IL2RG, |
| | SCIDX1, SCIDX, IMD4); HIV-1 (CCL5, SCYA5, D17S136E, TCP228), |
| | HIV susceptibility or infection (IL10, CSIF, CMKBR2, CCR2, |
| | CMKBR5, CCCKR5 (CCR5)); Immunodeficiencies (CD3E, CD3G, |
| | AICDA, AID, HIGM2, TNFRSF5, CD40, UNG, DGU, HIGM4, |
| | TNFSF5, CD40LG, HIGM1, IGM, FOXP3, IPEX, AIID, XPID, PIDX, |
| | TNFRSF14B, TACI); Inflammation (IL-10, IL-1 (IL-1a, IL-1b), IL-13, |
| | IL-17 (IL-17a (CTLA8), IL-17b, IL-17c, IL-17d, IL-17f), II-23, Cx3cr1, |
| | ptpn22, TNFa, NOD2/CARD15 for IBD, IL-6, IL-12 (IL-12a, IL-12b), |
| | CTLA4, Cx3cl1); Severe combined immunodeficiencies (SCIDs)(JAK3, |
| | JAKL, DCLRE1C, ARTEMIS, SCIDA, RAG1, RAG2, ADA, PTPRC, |
| | CD45, LCA, IL7R, CD3D, T3D, IL2RG, SCIDX1, SCIDX, IMD4). |
| Metabolic, liver, | Amyloid neuropathy (TTR, PALB); Amyloidosis (APOA1, APP, AAA, |
| kidney and protein | CVAP, AD1, GSN, FGA, LYZ, TTR, PALB); Cirrhosis (KRT18, KRT8, |
| diseases and disorders | CIRH1A, NAIC, TEX292, KIAA1988); Cystic fibrosis (CFTR, ABCC7, |
| | CF, MRP7); Glycogen storage diseases (SLC2A2, GLUT2, G6PC, |
| | G6PT, G6PT1, GAA, LAMP2, LAMPB, AGL, GDE, GBE1, GYS2, |
| | PYGL, PFKM); Hepatic adenoma, 142330 (TCF1, HNF1A, MODY3), |
| | Hepatic failure, early onset, and neurologic disorder (SCOD1, SCO1), |
| | Hepatic lipase deficiency (LIPC), Hepatoblastoma, cancer and |
| | carcinomas (CTNNB1, PDGFRL, PDGRL, PRLTS, AXIN1, AXIN, |
| | CTNNB1, TP53, P53, LFS1, IGF2R, MPRI, MET, CASP8, MCH5; |
| | Medullary cystic kidney disease (UMOD, HNFJ, FJHN, MCKD2, |
| | ADMCKD2); Phenylketonuria (PAH, PKU1, QDPR, DHPR, PTS); |
| | Polycystic kidney and hepatic disease (FCYT, PKHD1, ARPKD, PKD1, |
| | PKD2, PKD4, PKDTS, PRKCSH, G19P1, PCLD, SEC63). |
| Muscular/Skeletal | Becker muscular dystrophy (DMD, BMD, MYF6), Duchenne Muscular |
| diseases and disorders | Dystrophy (DMD, BMD); Emery-Dreifuss muscular dystrophy (LMNA, |
| | LMN1, EMD2, FPLD, CMD1A, HGPS, LGMD1B, LMNA, LMN1, |
| | EMD2, FPLD, CMD1A); Facioscapulohumeral muscular dystrophy |
| | (FSHMD1A, FSHD1A); Muscular dystrophy (FKRP, MDC1C, |
| | LGMD2I, LAMA2, LAMM, LARGE, KIAA0609, MDC1D, FCMD, |
| | TTID, MYOT, CAPN3, CANP3, DYSF, LGMD2B, SGCG, LGMD2C, |
| | DMDA1, SCG3, SGCA, ADL, DAG2, LGMD2D, DMDA2, SGCB, |
| | LGMD2E, SGCD, SGD, LGMD2F, CMD1L, TCAP, LGMD2G, |
| | CMD1N, TRIM32, HT2A, LGMD2H, FKRP, MDC1C, LGMD2I, TTN, |
| | CMD1G, TMD, LGMD2J, POMT1, CAV3, LGMD1C, SEPN1, SELN, |
| | RSMD1, PLEC1, PLTN, EBS1); Osteopetrosis (LRP5, BMND1, LRP7, |
| | LR3, OPPG, VBCH2, CLCN7, CLC7, OPTA2, OSTM1, GL, TCIRG1, |
| | TIRC7, OC116, OPTB1); Muscular atrophy (VAPB, VAPC, ALS8, |
| | SMN1, SMA1, SMA2, SMA3, SMA4, BSCL2, SPG17, GARS, SMAD1, |
| | CMT2D, HEXB, IGHMBP2, SMUBP2, CATF1, SMARD1). |
| Neurological and | ALS (SOD1, ALS2, STEX, FUS, TARDBP, VEGF (VEGF-a, VEGF-b, |
| neuronal diseases and | VEGF-c); Alzheimer disease (APP, AAA, CVAP, AD1, APOE, AD2, |
| disorders | PSEN2, AD4, STM2, APBB2, FE65L1, NOS3, PLAU, URK, ACE, |
| | DCP1, ACE1, MPO, PACIP1, PAXIP1L, PTIP, A2M, BLMH, BMH, |
| | PSEN1, AD3); Autism (Mecp2, BZRAP1, MDGA2, Sema5A, Neurexin1, |
| | GLO1, MECP2, RTT, PPMX, MRX16, MRX79, NLGN3, NLGN4, |
| | KIAA1260, AUTSX2); Fragile X Syndrome (FMR2, FXR1, FXR2, |
| | mGLUR5); Huntington's disease and disease like disorders (HD, IT15, |
| | PRNP, PRIP, JPH3, JP3, HDL2, TBP, SCA17); Parkinson disease |
| | (NR4A2, NURR1, NOT, TINUR, SNCAIP, TBP, SCA17, SNCA, |
| | NACP, PARK1, PARK4, DJ1, PARK7, LRRK2, PARK8, PINK1, |
| | PARK6, UCHL1, PARK5, SNCA, NACP, PARK1, PARK4, PRKN, |
| | PARK2, PDJ, DBH, NDUFV2); Rett syndrome (MECP2, RTT, PPMX, |
| | MRX16, MRX79, CDKL5, STK9, MECP2, RTT, PPMX, MRX16, |
| | MRX79, x-Synuclein, DJ-1); Schizophrenia (Neuregulin1 (Nrg1), Erb4 |
| | (receptor for Neuregulin), Complexin1 (Cplx1), Tph1 Tryptophan |
| | hydroxylase, Tph2, Tryptophan hydroxylase 2, Neurexin 1, GSK3, |
| | GSK3a, GSK3b, 5-HTT (Slc6a4), COMT, DRD (Drd1a), SLC6A3, |
| | DAOA, DTNBP1, Dao (Dao1)); Secretase Related Disorders (APH-1 |
| | (alpha and beta), Presenilin (Psen1), nicastrin, (Ncstn), PEN-2, Nos1, |
| | Parp1, Nat1, Nat2); Trinucleotide Repeat Disorders (HTT (Huntington's |
| | Dx), SBMA/SMAX1/AR (Kennedy's Dx), FXN/X25 (Friedrich's |
| | Ataxia), ATX3 (Machado- Joseph's Dx), ATXN1 and ATXN2 |
| | (spinocerebellar ataxias), DMPK (myotonic dystrophy), Atrophin-1 and |
| | Atn1 (DRPLA Dx), CBP (Creb-BP - global instability), VLDLR |
| | (Alzheimer's), Atxn7, Atxn10). |
| Occular diseases and | Age-related macular degeneration (Abcr, Ccl2, Cc2, cp (ceruloplasmin), |
| disorders | Timp3, cathepsinD, Vldlr, Ccr2); Cataract (CRYAA, CRYA1, CRYBB2, |
| | CRYB2, PITX3, BFSP2, CP49, CP47, CRYAA, CRYA1, PAX6, AN2, |
| | MGDA, CRYBA1, CRYB1, CRYGC, CRYG3, CCL, LIM2, MP19, |
| | CRYGD, CRYG4, BFSP2, CP49, CP47, HSF4, CTM, HSF4, CTM, |
| | MIP, AQP0, CRYAB, CRYA2, CTPP2, CRYBB1, CRYGD, CRYG4, |
| | CRYBB2, CRYB2, CRYGC, CRYG3, CCL, CRYAA, CRYA1, GJA8, |
| | CX50, CAE1, GJA3, CX46, CZP3, CAE3, CCM1, CAM, KRIT1); |
| | Corneal clouding and dystrophy (APOA1, TGFBI, CSD2, CDGG1, |
| | CSD, BIGH3, CDG2, TACSTD2, TROP2, M1S1, VSX1, RINX, PPCD, |
| | PPD, KTCN, COL8A2, FECD, PPCD2, PIP5K3, CFD); Cornea plana |
| | congenital (KERA, CNA2); Glaucoma (MYOC, TIGR, GLC1A, JOAG, |
| | GPOA, OPTN, GLC1E, FIP2, HYPL, NRP, CYP1B1, GLC3A, OPA1, |
| | NTG, NPG, CYP1B1, GLC3A); Leber congenital amaurosis (CRB1, |
| | RP12, CRX, CORD2, CRD, RPGRIP1, LCA6, CORD9, RPE65, RP20, |
| | AIPL1, LCA4, GUCY2D, GUC2D, LCA1, CORD6, RDH12, LCA3); |
| | Macular dystrophy (ELOVL4, ADMD, STGD2, STGD3, RDS, RP7, |
| | PRPH2, PRPH, AVMD, AOFMD, VMD2). |

TABLE C

| CELLULAR | |
|---|---|
| FUNCTION | GENES |
| PI3K/AKT Signaling | PRKCE; ITGAM; ITGA5; IRAK1; PRKAA2; EIF2AK2; |
| | PTEN; EIF4E; PRKCZ; GRK6; MAPK1; TSC1; PLK1; |
| | AKT2; IKBKB; PIK3CA; CDK8; CDKN1B; NFKB2; BCL2; |
| | PIK3CB; PPP2R1A; MAPK8; BCL2L1; MAPK3; TSC2; |
| | ITGA1; KRAS; EIF4EBP1; RELA; PRKCD; NOS3; |
| | PRKAA1; MAPK9; CDK2; PPP2CA; PIM1; ITGB7; |
| | YWHAZ; ILK; TP53; RAF1; IKBKG; RELB; DYRK1A; |
| | CDKN1A; ITGB1; MAP2K2; JAK1; AKT1; JAK2; PIK3R1; |
| | CHUK; PDPK1; PPP2R5C; CTNNB1; MAP2K1; NFKB1; |
| | PAK3; ITGB3; CCND1; GSK3A; FRAP1; SFN; ITGA2; |
| | TTK; CSNK1A1; BRAF; GSK3B; AKT3; FOXO1; SGK; |
| | HSP90AA1; RPS6KB1 |
| ERK/MAPK Signaling | PRKCE; ITGAM; ITGA5; HSPB1; IRAK1; PRKAA2; |
| | EIF2AK2; RAC1; RAP1A; TLN1; EIF4E; ELK1; GRK6; |
| | MAPK1; RAC2; PLK1; AKT2; PIK3CA; CDK8; CREB1; |
| | PRKCI; PTK2; FOS; RPS6KA4; PIK3CB; PPP2R1A; |
| | PIK3C3; MAPK8; MAPK3; ITGA1; ETS1; KRAS; MYCN; |
| | EIF4EBP1; PPARG; PRKCD; PRKAA1; MAPK9; SRC; |
| | CDK2; PPP2CA; PIM1; PIK3C2A; ITGB7; YWHAZ; |
| | PPP1CC; KSR1; PXN; RAF1; FYN; DYRK1A; ITGB1; |
| | MAP2K2; PAK4; PIK3R1; STAT3; PPP2R5C; MAP2K1; |
| | PAK3; ITGB3; ESR1; ITGA2; MYC; TTK; CSNK1A1; |
| | CRKL; BRAF; ATF4; PRKCA; SRF; STAT1; SGK |
| Glucocorticoid Receptor | RAC1; TAF4B; EP300; SMAD2; TRAF6; PCAF; ELK1; |
| Signaling | MAPK1; SMAD3; AKT2; IKBKB; NCOR2; UBE2I; |
| | PIK3CA; CREB1; FOS; HSPA5; NFKB2; BCL2; |
| | MAP3K14; STAT5B; PIK3CB; PIK3C3; MAPK8; BCL2L1; |
| | MAPK3; TSC22D3; MAPK10; NRIP1; KRAS; MAPK13; |
| | RELA; STAT5A; MAPK9; NOS2A; PBX1; NR3C1; |
| | PIK3C2A; CDKN1C; TRAF2; SERPINE1; NCOA3; |
| | MAPK14; TNF; RAF1; IKBKG; MAP3K7; CREBBP; |
| | CDKN1A; MAP2K2; JAK1; IL8; NCOA2; AKT1; JAK2; |
| | PIK3R1; CHUK; STAT3; MAP2K1; NFKB1; TGFBR1; |
| | ESR1; SMAD4; CEBPB; JUN; AR; AKT3; CCL2; MMP1; |
| | STAT1; IL6; HSP90AA1 |
| Axonal Guidance | PRKCE; ITGAM; ROCK1; ITGA5; CXCR4; ADAM12; |
| Signaling | |
| | IGF1; RAC1; RAP1A; EIF4E; PRKCZ; NRP1; NTRK2; |
| | ARHGEF7; SMO; ROCK2; MAPK1; PGF; RAC2; |
| | PTPN11; GNAS; AKT2; PIK3CA; ERBB2; PRKCI; PTK2; |
| | CFL1; GNAQ; PIK3CB; CXCL12; PIK3C3; WNT11; |
| | PRKD1; GNB2L1; ABL1; MAPK3; ITGA1; KRAS; RHOA; |
| | PRKCD; PIK3C2A; ITGB7; GLI2; PXN; VASP; RAF1; |
| | FYN; ITGB1; MAP2K2; PAK4; ADAM17; AKT1; PIK3R1; |
| | GLI1; WNT5A; ADAM10; MAP2K1; PAK3; ITGB3; |
| | CDC42; VEGFA; ITGA2; EPHA8; CRKL; RND1; GSK3B; |
| | AKT3; PRKCA |
| Ephrin Receptor | PRKCE; ITGAM; ROCK1; ITGA5; CXCR4; IRAK1; |
| Signaling | |
| | PRKAA2; EIF2AK2; RAC1; RAP1A; GRK6; ROCK2; |
| | MAPK1; PGF; RAC2; PTPN11; GNAS; PLK1; AKT2; |
| | DOK1; CDK8; CREB1; PTK2; CFL1; GNAQ; MAP3K14; |
| | CXCL12; MAPK8; GNB2L1; ABL1; MAPK3; ITGA1; |
| | KRAS; RHOA; PRKCD; PRKAA1; MAPK9; SRC; CDK2; |
| | PIM1; ITGB7; PXN; RAF1; FYN; DYRK1A; ITGB1; |
| | MAP2K2; PAK4; AKT1; JAK2; STAT3; ADAM10; |
| | MAP2K1; PAK3; ITGB3; CDC42; VEGFA; ITGA2; |
| | EPHA8; TTK; CSNK1A1; CRKL; BRAF; PTPN13; ATF4; |
| | AKT3; SGK |
| Actin Cytoskeleton | ACTN4; PRKCE; ITGAM; ROCK1; ITGA5; IRAK1; |
| Signaling | PRKAA2; EIF2AK2; RAC1; INS; ARHGEF7; GRK6; |
| | ROCK2; MAPK1; RAC2; PLK1; AKT2; PIK3CA; CDK8; |
| | PTK2; CFL1; PIK3CB; MYH9; DIAPH1; PIK3C3; MAPK8; |
| | F2R; MAPK3; SLC9A1; ITGA1; KRAS; RHOA; PRKCD; |
| | PRKAA1; MAPK9; CDK2; PIM1; PIK3C2A; ITGB7; |
| | PPP1CC; PXN; VIL2; RAF1; GSN; DYRK1A; ITGB1; |
| | MAP2K2; PAK4; PIP5K1A; PIK3R1; MAP2K1; PAK3; |
| | ITGB3; CDC42; APC; ITGA2; TTK; CSNK1A1; CRKL; |
| | BRAF; VAV3; SGK |
| Huntington's Disease | PRKCE; IGF1; EP300; RCOR1; PRKCZ; HDAC4; TGM2; |
| Signaling | MAPK1; CAPNS1; AKT2; EGFR; NCOR2; SP1; CAPN2; |
| | PIK3CA; HDAC5; CREB1; PRKCI; HSPA5; REST; |
| | GNAQ; PIK3CB; PIK3C3; MAPK8; IGF1R; PRKD1; |
| | GNB2L1; BCL2L1; CAPN1; MAPK3; CASP8; HDAC2; |
| | HDAC7A; PRKCD; HDAC11; MAPK9; HDAC9; PIK3C2A; |
| | HDAC3; TP53; CASP9; CREBBP; AKT1; PIK3R1; |
| | PDPK1; CASP1; APAF1; FRAP1; CASP2; JUN; BAX; |
| | ATF4; AKT3; PRKCA; CLTC; SGK; HDAC6; CASP3 |
| Apoptosis Signaling | PRKCE; ROCK1; BID; IRAK1; PRKAA2; EIF2AK2; BAK1; |
| | BIRC4; GRK6; MAPK1; CAPNS1; PLK1; AKT2; IKBKB; |
| | CAPN2; CDK8; FAS; NFKB2; BCL2; MAP3K14; MAPK8; |
| | BCL2L1; CAPN1; MAPK3; CASP8; KRAS; RELA; |
| | PRKCD; PRKAA1; MAPK9; CDK2; PIM1; TP53; TNF; |
| | RAF1; IKBKG; RELB; CASP9; DYRK1A; MAP2K2; |
| | CHUK; APAF1; MAP2K1; NFKB1; PAK3; LMNA; CASP2; |
| | BIRC2; TTK; CSNK1A1; BRAF; BAX; PRKCA; SGK; |
| | CASP3; BIRC3; PARP1 |
| B Cell Receptor | RAC1; PTEN; LYN; ELK1; MAPK1; RAC2; PTPN11; |
| Signaling | |
| | AKT2; IKBKB; PIK3CA; CREB1; SYK; NFKB2; CAMK2A; |
| | MAP3K14; PIK3CB; PIK3C3; MAPK8; BCL2L1; ABL1; |
| | MAPK3; ETS1; KRAS; MAPK13; RELA; PTPN6; MAPK9; |
| | EGR1; PIK3C2A; BTK; MAPK14; RAF1; IKBKG; RELB; |
| | MAP3K7; MAP2K2; AKT1; PIK3R1; CHUK; MAP2K1; |
| | NFKB1; CDC42; GSK3A; FRAP1; BCL6; BCL10; JUN; |
| | GSK3B; ATF4; AKT3; VAV3; RPS6KB1 |
| Leukocyte Extravasation | ACTN4; CD44; PRKCE; ITGAM; ROCK1; CXCR4; CYBA; |
| Signaling | RAC1; RAP1A; PRKCZ; ROCK2; RAC2; PTPN11; |
| | MMP14; PIK3CA; PRKCI; PTK2; PIK3CB; CXCL12; |
| | PIK3C3; MAPK8; PRKD1; ABL1; MAPK10; CYBB; |
| | MAPK13; RHOA; PRKCD; MAPK9; SRC; PIK3C2A; BTK; |
| | MAPK14; NOX1; PXN; VIL2; VASP; ITGB1; MAP2K2; |
| | CTNND1; PIK3R1; CTNNB1; CLDN1; CDC42; F11R; ITK; |
| | CRKL; VAV3; CTTN; PRKCA; MMP1; MMP9 |
| Integrin Signaling | ACTN4; ITGAM; ROCK1; ITGA5; RAC1; PTEN; RAP1A; |
| | TLN1; ARHGEF7; MAPK1; RAC2; CAPNS1; AKT2; |
| | CAPN2; PIK3CA; PTK2; PIK3CB; PIK3C3; MAPK8; |
| | CAV1; CAPN1; ABL1; MAPK3; ITGA1; KRAS; RHOA; |
| | SRC; PIK3C2A; ITGB7; PPP1CC; ILK; PXN; VASP; |
| | RAF1; FYN; ITGB1; MAP2K2; PAK4; AKT1; PIK3R1; |
| | TNK2; MAP2K1; PAK3; ITGB3; CDC42; RND3; ITGA2; |
| | CRKL; BRAF; GSK3B; AKT3 |
| Acute Phase Response | IRAK1; SOD2; MYD88; TRAF6; ELK1; MAPK1; PTPN11; |
| Signaling | AKT2; IKBKB; PIK3CA; FOS; NFKB2; MAP3K14; |
| | PIK3CB; MAPK8; RIPK1; MAPK3; IL6ST; KRAS; |
| | MAPK13; IL6R; RELA; SOCS1; MAPK9; FTL; NR3C1; |
| | TRAF2; SERPINE1; MAPK14; TNF; RAF1; PDK1; |
| | IKBKG; RELB; MAP3K7; MAP2K2; AKT1; JAK2; PIK3R1; |
| | CHUK; STAT3; MAP2K1; NFKB1; FRAP1; CEBPB; JUN; |
| | AKT3; IL1R1; IL6 |
| PTEN Signaling | ITGAM; ITGA5; RAC1; PTEN; PRKCZ; BCL2L11; |
| | MAPK1; RAC2; AKT2; EGFR; IKBKB; CBL; PIK3CA; |
| | CDKN1B; PTK2; NFKB2; BCL2; PIK3CB; BCL2L1; |
| | MAPK3; ITGA1; KRAS; ITGB7; ILK; PDGFRB; INSR; |
| | RAF1; IKBKG; CASP9; CDKN1A; ITGB1; MAP2K2; |
| | AKT1; PIK3R1; CHUK; PDGFRA; PDPK1; MAP2K1; |
| | NFKB1; ITGB3; CDC42; CCND1; GSK3A; ITGA2; |
| | GSK3B; AKT3; FOXO1; CASP3; RPS6KB1 |
| p53 Signaling | PTEN; EP300; BBC3; PCAF; FASN; BRCA1; GADD45A; |
| | BIRC5; AKT2; PIK3CA; CHEK1; TP53INP1; BCL2; |
| | PIK3CB; PIK3C3; MAPK8; THBS1; ATR; BCL2L1; E2F1; |
| | PMAIP1; CHEK2; TNFRSF10B; TP73; RB1; HDAC9; |
| | CDK2; PIK3C2A; MAPK14; TP53; LRDD; CDKN1A; |
| | HIPK2; AKT1; PIK3R1; RRM2B; APAF1; CTNNB1; |
| | SIRT1; CCND1; PRKDC; ATM; SFN; CDKN2A; JUN; |
| | SNAI2; GSK3B; BAX; AKT3 |
| Aryl Hydrocarbon | HSPB1; EP300; FASN; TGM2; RXRA; MAPK1; NQO1; |
| Receptor | |
| Signaling | NCOR2; SP1; ARNT; CDKN1B; FOS; CHEK1; |
| | SMARCA4; NFKB2; MAPK8; ALDH1A1; ATR; E2F1; |
| | MAPK3; NRIP1; CHEK2; RELA; TP73; GSTP1; RB1; |
| | SRC; CDK2; AHR; NFE2L2; NCOA3; TP53; TNF; |
| | CDKN1A; NCOA2; APAF1; NFKB1; CCND1; ATM; ESR1; |
| | CDKN2A; MYC; JUN; ESR2; BAX; IL6; CYP1B1; |
| | HSP90AA1 |
| Xenobiotic Metabolism | PRKCE; EP300; PRKCZ; RXRA; MAPK1; NQO1; |
| Signaling | NCOR2; PIK3CA; ARNT; PRKCI; NFKB2; CAMK2A; |
| | PIK3CB; PPP2R1A; PIK3C3; MAPK8; PRKD1; |
| | ALDH1A1; MAPK3; NRIP1; KRAS; MAPK13; PRKCD; |
| | GSTP1; MAPK9; NOS2A; ABCB1; AHR; PPP2CA; FTL; |
| | NFE2L2; PIK3C2A; PPARGC1A; MAPK14; TNF; RAF1; |
| | CREBBP; MAP2K2; PIK3R1; PPP2R5C; MAP2K1; |
| | NFKB1; KEAP1; PRKCA; EIF2AK3; IL6; CYP1B1; |
| | HSP90AA1 |
| SAPK/JNK Signaling | PRKCE; IRAK1; PRKAA2; EIF2AK2; RAC1; ELK1; |
| | GRK6; MAPK1; GADD45A; RAC2; PLK1; AKT2; PIK3CA; |
| | FADD; CDK8; PIK3CB; PIK3C3; MAPK8; RIPK1; |
| | GNB2L1; IRS1; MAPK3; MAPK10; DAXX; KRAS; |
| | PRKCD; PRKAA1; MAPK9; CDK2; PIM1; PIK3C2A; |
| | TRAF2; TP53; LCK; MAP3K7; DYRK1A; MAP2K2; |
| | PIK3R1; MAP2K1; PAK3; CDC42; JUN; TTK; CSNK1A1; |
| | CRKL; BRAF; SGK |
| PPAr/RXR Signaling | PRKAA2; EP300; INS; SMAD2; TRAF6; PPARA; FASN; |
| | RXRA; MAPK1; SMAD3; GNAS; IKBKB; NCOR2; |
| | ABCA1; GNAQ; NFKB2; MAP3K14; STAT5B; MAPK8; |
| | IRS1; MAPK3; KRAS; RELA; PRKAA1; PPARGC1A; |
| | NCOA3; MAPK14; INSR; RAF1; IKBKG; RELB; MAP3K7; |
| | CREBBP; MAP2K2; JAK2; CHUK; MAP2K1; NFKB1; |
| | TGFBR1; SMAD4; JUN; IL1R1; PRKCA; IL6; HSP90AA1; |
| | ADIPOQ |
| NF-KB Signaling | IRAK1; EIF2AK2; EP300; INS; MYD88; PRKCZ; TRAF6; |
| | TBK1; AKT2; EGFR; IKBKB; PIK3CA; BTRC; NFKB2; |
| | MAP3K14; PIK3CB; PIK3C3; MAPK8; RIPK1; HDAC2; |
| | KRAS; RELA; PIK3C2A; TRAF2; TLR4; PDGFRB; TNF; |
| | INSR; LCK; IKBKG; RELB; MAP3K7; CREBBP; AKT1; |
| | PIK3R1; CHUK; PDGFRA; NFKB1; TLR2; BCL10; |
| | GSK3B; AKT3; TNFAIP3; IL1R1 |
| Neuregulin Signaling | ERBB4; PRKCE; ITGAM; ITGA5; PTEN; PRKCZ; ELK1; |
| | MAPK1; PTPN11; AKT2; EGFR; ERBB2; PRKCI; |
| | CDKN1B; STAT5B; PRKD1; MAPK3; ITGA1; KRAS; |
| | PRKCD; STAT5A; SRC; ITGB7; RAF1; ITGB1; MAP2K2; |
| | ADAM17; AKT1; PIK3R1; PDPK1; MAP2K1; ITGB3; |
| | EREG; FRAP1; PSEN1; ITGA2; MYC; NRG1; CRKL; |
| | AKT3; PRKCA; HSP90AA1; RPS6KB1 |
| Wnt & Beta catenin | CD44; EP300; LRP6; DVL3; CSNK1E; GJA1; SMO; |
| Signaling | AKT2; PIN1; CDH1; BTRC; GNAQ; MARK2; PPP2R1A; |
| | WNT11; SRC; DKK1; PPP2CA; SOX6; SFRP2; ILK; |
| | LEF1; SOX9; TP53; MAP3K7; CREBBP; TCF7L2; AKT1; |
| | PPP2R5C; WNT5A; LRP5; CTNNB1; TGFBR1; CCND1; |
| | GSK3A; DVL1; APC; CDKN2A; MYC; CSNK1A1; GSK3B; |
| | AKT3; SOX2 |
| Insulin Receptor | PTEN; INS; EIF4E; PTPN1; PRKCZ; MAPK1; TSC1; |
| Signaling | |
| | PTPN11; AKT2; CBL; PIK3CA; PRKCI; PIK3CB; PIK3C3; |
| | MAPK8; IRS1; MAPK3; TSC2; KRAS; EIF4EBP1; |
| | SLC2A4; PIK3C2A; PPP1CC; INSR; RAF1; FYN; |
| | MAP2K2; JAK1; AKT1; JAK2; PIK3R1; PDPK1; MAP2K1; |
| | GSK3A; FRAP1; CRKL; GSK3B; AKT3; FOXO1; SGK; |
| | RPS6KB1 |
| IL-6 Signaling | HSPB1; TRAF6; MAPKAPK2; ELK1; MAPK1; PTPN11; |
| | IKBKB; FOS; NFKB2; MAP3K14; MAPK8; MAPK3; |
| | MAPK10; IL6ST; KRAS; MAPK13; IL6R; RELA; SOCS1; |
| | MAPK9; ABCB1; TRAF2; MAPK14; TNF; RAF1; IKBKG; |
| | RELB; MAP3K7; MAP2K2; IL8; JAK2; CHUK; STAT3; |
| | MAP2K1; NFKB1; CEBPB; JUN; IL1R1; SRF; IL6 |
| Hepatic Cholestasis | PRKCE; IRAK1; INS; MYD88; PRKCZ; TRAF6; PPARA; |
| | RXRA; IKBKB; PRKCI; NFKB2; MAP3K14; MAPK8; |
| | PRKD1; MAPK10; RELA; PRKCD; MAPK9; ABCB1; |
| | TRAF2; TLR4; TNF; INSR; IKBKG; RELB; MAP3K7; IL8; |
| | CHUK; NR1H2; TJP2; NFKB1; ESR1; SREBF1; FGFR4; |
| | JUN; IL1R1; PRKCA; IL6 |
| IGF-1 Signaling | IGF1; PRKCZ; ELK1; MAPK1; PTPN11; NEDD4; AKT2; |
| | PIK3CA; PRKCI; PTK2; FOS; PIK3CB; PIK3C3; MAPK8; |
| | IGF1R; IRS1; MAPK3; IGFBP7; KRAS; PIK3C2A; |
| | YWHAZ; PXN; RAF1; CASP9; MAP2K2; AKT1; PIK3R1; |
| | PDPK1; MAP2K1; IGFBP2; SFN; JUN; CYR61; AKT3; |
| | FOXO1; SRF; CTGF; RPS6KB1 |
| NRF2-mediated | PRKCE; EP300; SOD2; PRKCZ; MAPK1; SQSTM1; |
| Oxidative | |
| Stress Response | NQO1; PIK3CA; PRKCI; FOS; PIK3CB; PIK3C3; MAPK8; |
| | PRKD1; MAPK3; KRAS; PRKCD; GSTP1; MAPK9; FTL; |
| | NFE2L2; PIK3C2A; MAPK14; RAF1; MAP3K7; CREBBP; |
| | MAP2K2; AKT1; PIK3R1; MAP2K1; PPIB; JUN; KEAP1; |
| | GSK3B; ATF4; PRKCA; EIF2AK3; HSP90AA1 |
| Hepatic Fibrosis/Hepatic | EDN1; IGF1; KDR; FLT1; SMAD2; FGFR1; MET; PGF; |
| Stellate Cell Activation | SMAD3; EGFR; FAS; CSF1; NFKB2; BCL2; MYH9; |
| | IGF1R; IL6R; RELA; TLR4; PDGFRB; TNF; RELB; IL8; |
| | PDGFRA; NFKB1; TGFBR1; SMAD4; VEGFA; BAX; |
| | IL1R1; CCL2; HGF; MMP1; STAT1; IL6; CTGF; MMP9 |
| PPAR Signaling | EP300; INS; TRAF6; PPARA; RXRA; MAPK1; IKBKB; |
| | NCOR2; FOS; NFKB2; MAP3K14; STAT5B; MAPK3; |
| | NRIP1; KRAS; PPARG; RELA; STAT5A; TRAF2; |
| | PPARGC1A; PDGFRB; TNF; INSR; RAF1; IKBKG; |
| | RELB; MAP3K7; CREBBP; MAP2K2; CHUK; PDGFRA; |
| | MAP2K1; NFKB1; JUN; IL1R1; HSP90AA1 |
| Fc Epsilon RI Signaling | PRKCE; RAC1; PRKCZ; LYN; MAPK1; RAC2; PTPN11; |
| | AKT2; PIK3CA; SYK; PRKCI; PIK3CB; PIK3C3; MAPK8; |
| | PRKD1; MAPK3; MAPK10; KRAS; MAPK13; PRKCD; |
| | MAPK9; PIK3C2A; BTK; MAPK14; TNF; RAF1; FYN; |
| | MAP2K2; AKT1; PIK3R1; PDPK1; MAP2K1; AKT3; |
| | VAV3; PRKCA |
| G-Protein Coupled | PRKCE; RAP1A; RGS16; MAPK1; GNAS; AKT2; IKBKB; |
| Receptor Signaling | PIK3CA; CREB1; GNAQ; NFKB2; CAMK2A; PIK3CB; |
| | PIK3C3; MAPK3; KRAS; RELA; SRC; PIK3C2A; RAF1; |
| | IKBKG; RELB; FYN; MAP2K2; AKT1; PIK3R1; CHUK; |
| | PDPK1; STAT3; MAP2K1; NFKB1; BRAF; ATF4; AKT3; |
| | PRKCA |
| Inositol Phosphate | PRKCE; IRAK1; PRKAA2; EIF2AK2; PTEN; GRK6; |
| Metabolism | MAPK1; PLK1; AKT2; PIK3CA; CDK8; PIK3CB; PIK3C3; |
| | MAPK8; MAPK3; PRKCD; PRKAA1; MAPK9; CDK2; |
| | PIM1; PIK3C2A; DYRK1A; MAP2K2; PIP5K1A; PIK3R1; |
| | MAP2K1; PAK3; ATM; TTK; CSNK1A1; BRAF; SGK |
| PDGF Signaling | EIF2AK2; ELK1; ABL2; MAPK1; PIK3CA; FOS; PIK3CB; |
| | PIK3C3; MAPK8; CAV1; ABL1; MAPK3; KRAS; SRC; |
| | PIK3C2A; PDGFRB; RAF1; MAP2K2; JAK1; JAK2; |
| | PIK3R1; PDGFRA; STAT3; SPHK1; MAP2K1; MYC; |
| | JUN; CRKL; PRKCA; SRF; STAT1; SPHK2 |
| VEGF Signaling | ACTN4; ROCK1; KDR; FLT1; ROCK2; MAPK1; PGF; |
| | AKT2; PIK3CA; ARNT; PTK2; BCL2; PIK3CB; PIK3C3; |
| | BCL2L1; MAPK3; KRAS; HIF1A; NOS3; PIK3C2A; PXN; |
| | RAF1; MAP2K2; ELAVL1; AKT1; PIK3R1; MAP2K1; SFN; |
| | VEGFA; AKT3; FOXO1; PRKCA |
| Natural Killer Cell | PRKCE; RAC1; PRKCZ; MAPK1; RAC2; PTPN11; |
| Signaling | |
| | KIR2DL3; AKT2; PIK3CA; SYK; PRKCI; PIK3CB; |
| | PIK3C3; PRKD1; MAPK3; KRAS; PRKCD; PTPN6; |
| | PIK3C2A; LCK; RAF1; FYN; MAP2K2; PAK4; AKT1; |
| | PIK3R1; MAP2K1; PAK3; AKT3; VAV3; PRKCA |
| Cell Cycle: G1/S | HDAC4; SMAD3; SUV39H1; HDAC5; CDKN1B; BTRC; |
| Checkpoint Regulation | ATR; ABL1; E2F1; HDAC2; HDAC7A; RB1; HDAC11; |
| | HDAC9; CDK2; E2F2; HDAC3; TP53; CDKN1A; CCND1; |
| | E2F4; ATM; RBL2; SMAD4; CDKN2A; MYC; NRG1; |
| | GSK3B; RBL1; HDAC6 |
| T Cell Receptor | RAC1; ELK1; MAPK1; IKBKB; CBL; PIK3CA; FOS; |
| Signaling | |
| | NFKB2; PIK3CB; PIK3C3; MAPK8; MAPK3; KRAS; |
| | RELA; PIK3C2A; BTK; LCK; RAF1; IKBKG; RELB; FYN; |
| | MAP2K2; PIK3R1; CHUK; MAP2K1; NFKB1; ITK; BCL10; |
| | JUN; VAV3 |
| Death Receptor Signaling | CRADD; HSPB1; BID; BIRC4; TBK1; IKBKB; FADD; |
| | FAS; NFKB2; BCL2; MAP3K14; MAPK8; RIPK1; CASP8; |
| | DAXX; TNFRSF10B; RELA; TRAF2; TNF; IKBKG; RELB; |
| | CASP9; CHUK; APAF1; NFKB1; CASP2; BIRC2; CASP3; |
| | BIRC3 |
| FGF Signaling | RAC1; FGFR1; MET; MAPKAPK2; MAPK1; PTPN11; |
| | AKT2; PIK3CA; CREB1; PIK3CB; PIK3C3; MAPK8; |
| | MAPK3; MAPK13; PTPN6; PIK3C2A; MAPK14; RAF1; |
| | AKT1; PIK3R1; STAT3; MAP2K1; FGFR4; CRKL; ATF4; |
| | AKT3; PRKCA; HGF |
| GM-CSF Signaling | LYN; ELK1; MAPK1; PTPN11; AKT2; PIK3CA; CAMK2A; |
| | STAT5B; PIK3CB; PIK3C3; GNB2L1; BCL2L1; MAPK3; |
| | ETS1; KRAS; RUNX1; PIM1; PIK3C2A; RAF1; MAP2K2; |
| | AKT1; JAK2; PIK3R1; STAT3; MAP2K1; CCND1; AKT3; |
| | STAT1 |
| Amyotrophic Lateral | BID; IGF1; RAC1; BIRC4; PGF; CAPNS1; CAPN2; |
| Sclerosis Signaling | PIK3CA; BCL2; PIK3CB; PIK3C3; BCL2L1; CAPN1; |
| | PIK3C2A; TP53; CASP9; PIK3R1; RAB5A; CASP1; |
| | APAF1; VEGFA; BIRC2; BAX; AKT3; CASP3; BIRC3 |
| JAK/Stat Signaling | PTPN1; MAPK1; PTPN11; AKT2; PIK3CA; STAT5B; |
| | PIK3CB; PIK3C3; MAPK3; KRAS; SOCS1; STAT5A; |
| | PTPN6; PIK3C2A; RAF1; CDKN1A; MAP2K2; JAK1; |
| | AKT1; JAK2; PIK3R1; STAT3; MAP2K1; FRAP1; AKT3; |
| | STAT1 |
| Nicotinate and | PRKCE; IRAK1; PRKAA2; EIF2AK2; GRK6; MAPK1; |
| Nicotinamide | |
| Metabolism | PLK1; AKT2; CDK8; MAPK8; MAPK3; PRKCD; PRKAA1; |
| | PBEF1; MAPK9; CDK2; PIM1; DYRK1A; MAP2K2; |
| | MAP2K1; PAK3; NT5E; TTK; CSNK1A1; BRAF; SGK |
| Chemokine Signaling | CXCR4; ROCK2; MAPK1; PTK2; FOS; CFL1; GNAQ; |
| | CAMK2A; CXCL12; MAPK8; MAPK3; KRAS; MAPK13; |
| | RHOA; CCR3; SRC; PPP1CC; MAPK14; NOX1; RAF1; |
| | MAP2K2; MAP2K1; JUN; CCL2; PRKCA |
| IL-2 Signaling | ELK1; MAPK1; PTPN11; AKT2; PIK3CA; SYK; FOS; |
| | STAT5B; PIK3CB; PIK3C3; MAPK8; MAPK3; KRAS; |
| | SOCS1; STAT5A; PIK3C2A; LCK; RAF1; MAP2K2; |
| | JAK1; AKT1; PIK3R1; MAP2K1; JUN; AKT3 |
| Synaptic Long Term | PRKCE; IGF1; PRKCZ; PRDX6; LYN; MAPK1; GNAS; |
| Depression | PRKCI; GNAQ; PPP2R1A; IGF1R; PRKD1; MAPK3; |
| | KRAS; GRN; PRKCD; NOS3; NOS2A; PPP2CA; |
| | YWHAZ; RAF1; MAP2K2; PPP2R5C; MAP2K1; PRKCA |
| Estrogen Receptor | TAF4B; EP300; CARM1; PCAF; MAPK1; NCOR2; |
| Signaling | SMARCA4; MAPK3; NRIP1; KRAS; SRC; NR3C1; |
| | HDAC3; PPARGC1A; RBM9; NCOA3; RAF1; CREBBP; |
| | MAP2K2; NCOA2; MAP2K1; PRKDC; ESR1; ESR2 |
| Protein Ubiquitination | TRAF6; SMURF1; BIRC4; BRCA1; UCHL1; NEDD4; |
| Pathway | CBL; UBE2I; BTRC; HSPA5; USP7; USP10; FBXW7; |
| | USP9X; STUB1; USP22; B2M; BIRC2; PARK2; USP8; |
| | USP1; VHL; HSP90AA1; BIRC3 |
| IL-10 Signaling | TRAF6; CCR1; ELK1; IKBKB; SP1; FOS; NFKB2; |
| | MAP3K14; MAPK8; MAPK13; RELA; MAPK14; TNF; |
| | IKBKG; RELB; MAP3K7; JAK1; CHUK; STAT3; NFKB1; |
| | JUN; IL1R1; IL6 |
| VDR/RXR Activation | PRKCE; EP300; PRKCZ; RXRA; GADD45A; HES1; |
| | NCOR2; SP1; PRKCI; CDKN1B; PRKD1; PRKCD; |
| | RUNX2; KLF4; YY1; NCOA3; CDKN1A; NCOA2; SPP1; |
| | LRP5; CEBPB; FOXO1; PRKCA |
| TGF-beta Signaling | EP300; SMAD2; SMURF1; MAPK1; SMAD3; SMAD1; |
| | FOS; MAPK8; MAPK3; KRAS; MAPK9; RUNX2; |
| | SERPINE1; RAF1; MAP3K7; CREBBP; MAP2K2; |
| | MAP2K1; TGFBR1; SMAD4; JUN; SMAD5 |
| Toll-like Receptor | IRAK1; EIF2AK2; MYD88; TRAF6; PPARA; ELK1; |
| Signaling | |
| | IKBKB; FOS; NFKB2; MAP3K14; MAPK8; MAPK13; |
| | RELA; TLR4; MAPK14; IKBKG; RELB; MAP3K7; CHUK; |
| | NFKB1; TLR2; JUN |
| p38 MAPK Signaling | HSPB1; IRAK1; TRAF6; MAPKAPK2; ELK1; FADD; FAS; |
| | CREB1; DDIT3; RPS6KA4; DAXX; MAPK13; TRAF2; |
| | MAPK14; TNF; MAP3K7; TGFBR1; MYC; ATF4; IL1R1; |
| | SRF; STAT1 |
| Neurotrophin/TRK | NTRK2; MAPK1; PTPN11; PIK3CA; CREB1; FOS; |
| Signaling | |
| | PIK3CB; PIK3C3; MAPK8; MAPK3; KRAS; PIK3C2A; |
| | RAF1; MAP2K2; AKT1; PIK3R1; PDPK1; MAP2K1; |
| | CDC42; JUN; ATF4 |
| FXR/RXR Activation | INS; PPARA; FASN; RXRA; AKT2; SDC1; MAPK8; |
| | APOB; MAPK10; PPARG; MTTP; MAPK9; PPARGC1A; |
| | TNF; CREBBP; AKT1; SREBF1; FGFR4; AKT3; FOXO1 |
| Synaptic Long Term | PRKCE; RAP1A; EP300; PRKCZ; MAPK1; CREB1; |
| Potentiation | PRKCI; GNAQ; CAMK2A; PRKD1; MAPK3; KRAS; |
| | PRKCD; PPP1CC; RAF1; CREBBP; MAP2K2; MAP2K1; |
| | ATF4; PRKCA |
| Calcium Signaling | RAP1A; EP300; HDAC4; MAPK1; HDAC5; CREB1; |
| | CAMK2A; MYH9; MAPK3; HDAC2; HDAC7A; HDAC11; |
| | HDAC9; HDAC3; CREBBP; CALR; CAMKK2; ATF4; |
| | HDAC6 |
| EGF Signaling | ELK1; MAPK1; EGFR; PIK3CA; FOS; PIK3CB; PIK3C3; |
| | MAPK8; MAPK3; PIK3C2A; RAF1; JAK1; PIK3R1; |
| | STAT3; MAP2K1; JUN; PRKCA; SRF; STAT1 |
| Hypoxia Signaling in the | EDN1; PTEN; EP300; NQO1; UBE2I; CREB1; ARNT; |
| Cardiovascular System | HIF1A; SLC2A4; NOS3; TP53; LDHA; AKT1; ATM; |
| | VEGFA; JUN; ATF4; VHL; HSP90AA1 |
| LPS/IL-1 Mediated | IRAK1; MYD88; TRAF6; PPARA; RXRA; ABCA1; |
| Inhibition | |
| of RXR Function | MAPK8; ALDH1A1; GSTP1; MAPK9; ABCB1; TRAF2; |
| | TLR4; TNF; MAP3K7; NR1H2; SREBF1; JUN; IL1R1 |
| LXR/RXR Activation | FASN; RXRA; NCOR2; ABCA1; NFKB2; IRF3; RELA; |
| | NOS2A; TLR4; TNF; RELB; LDLR; NR1H2; NFKB1; |
| | SREBF1; IL1R1; CCL2; IL6; MMP9 |
| Amyloid Processing | PRKCE; CSNK1E; MAPK1; CAPNS1; AKT2; CAPN2; |
| | CAPN1; MAPK3; MAPK13; MAPT; MAPK14; AKT1; |
| | PSEN1; CSNK1A1; GSK3B; AKT3; APP |
| IL-4 Signaling | AKT2; PIK3CA; PIK3CB; PIK3C3; IRS1; KRAS; SOCS1; |
| | PTPN6; NR3C1; PIK3C2A; JAK1; AKT1; JAK2; PIK3R1; |
| | FRAP1; AKT3; RPS6KB1 |
| Cell Cycle: G2/M DNA | EP300; PCAF; BRCA1; GADD45A; PLK1; BTRC; |
| Damage Checkpoint | CHEK1; ATR; CHEK2; YWHAZ; TP53; CDKN1A; |
| Regulation | PRKDC; ATM; SFN; CDKN2A |
| Nitric Oxide Signaling in | KDR; FLT1; PGF; AKT2; PIK3CA; PIK3CB; PIK3C3; |
| the | |
| Cardiovascular System | CAV1; PRKCD; NOS3; PIK3C2A; AKT1; PIK3R1; |
| | VEGFA; AKT3; HSP90AA1 |
| Purine Metabolism | NME2; SMARCA4; MYH9; RRM2; ADAR; EIF2AK4; |
| | PKM2; ENTPD1; RAD51; RRM2B; TJP2; RAD51C; |
| | NT5E; POLD1; NME1 |
| cAMP-mediated | RAP1A; MAPK1; GNAS; CREB1; CAMK2A; MAPK3; |
| Signaling | |
| | SRC; RAF1; MAP2K2; STAT3; MAP2K1; BRAF; ATF4 |
| Mitochondrial | SOD2; MAPK8; CASP8; MAPK10; MAPK9; CASP9; |
| Dysfunction | |
| | PARK7; PSEN1; PARK2; APP; CASP3 |
| Notch Signaling | HES1; JAG1; NUMB; NOTCH4; ADAM17; NOTCH2; |
| | PSEN1; NOTCH3; NOTCH1; DLL4 |
| Endoplasmic Reticulum | HSPA5; MAPK8; XBP1; TRAF2; ATF6; CASP9; ATF4; |
| Stress Pathway | EIF2AK3; CASP3 |
| Pyrimidine Metabolism | NME2; AICDA; RRM2; EIF2AK4; ENTPD1; RRM2B; |
| | NT5E; POLD1; NME1 |
| Parkinson's Signaling | UCHL1; MAPK8; MAPK13; MAPK14; CASP9; PARK7; |
| | PARK2; CASP3 |
| Cardiac & Beta | GNAS; GNAQ; PPP2R1A; GNB2L1; PPP2CA; PPP1CC; |
| Adrenergic | |
| Signaling | PPP2R5C |
| Glycolysis/Gluconeogenesis | HK2; GCK; GPI; ALDH1A1; PKM2; LDHA; HK1 |
| Interferon Signaling | IRF1; SOCS1; JAK1; JAK2; IFITM1; STAT1; IFIT3 |
| Sonic Hedgehog | ARRB2; SMO; GLI2; DYRK1A; GLI1; GSK3B; DYRK1B |
| Signaling | |
| Glycerophospholipid | PLD1; GRN; GPAM; YWHAZ; SPHK1; SPHK2 |
| Metabolism | |
| Phospholipid | PRDX6; PLD1; GRN; YWHAZ; SPHK1; SPHK2 |
| Degradation | |
| Tryptophan Metabolism | SIAH2; PRMT5; NEDD4; ALDH1A1; CYP1B1; SIAH1 |
| Lysine Degradation | SUV39H1; EHMT2; NSD1; SETD7; PPP2R5C |
| Nucleotide Excision | ERCC5; ERCC4; XPA; XPC; ERCC1 |
| Repair | |
| Pathway | |
| Starch and Sucrose | UCHL1; HK2; GCK; GPI; HK1 |
| Metabolism | |
| Aminosugars Metabolism | NQO1; HK2; GCK; HK1 |
| Arachidonic Acid | PRDX6; GRN; YWHAZ; CYP1B1 |
| Metabolism | |
| Circadian Rhythm | CSNK1E; CREB1; ATF4; NR1D1 |
| Signaling | |
| Coagulation System | BDKRB1; F2R; SERPINE1; F3 |
| Dopamine Receptor | PPP2R1A; PPP2CA; PPP1CC; PPP2R5C |
| Signaling | |
| Glutathione Metabolism | IDH2; GSTP1; ANPEP; IDH1 |
| Glycerolipid Metabolism | ALDH1A1; GPAM; SPHK1; SPHK2 |
| Linoleic Acid | PRDX6; GRN; YWHAZ; CYP1B1 |
| Metabolism | |
| Methionine Metabolism | DNMT1; DNMT3B; AHCY; DNMT3A |
| Pyruvate Metabolism | GLO1; ALDH1A1; PKM2; LDHA |
| Arginine and Proline | ALDH1A1; NOS3; NOS2A |
| Metabolism | |
| Eicosanoid Signaling | PRDX6; GRN; YWHAZ |
| Fructose and Mannose | HK2; GCK; HK1 |
| Metabolism | |
| Galactose Metabolism | HK2; GCK; HK1 |
| Stilbene, Coumarine and | PRDX6; PRDX1; TYR |
| Lignin Biosynthesis | |
| Antigen Presentation | CALR; B2M |
| Pathway | |
| Biosynthesis of Steroids | NQO1; DHCR7 |
| Butanoate Metabolism | ALDH1A1; NLGN1 |
| Citrate Cycle | IDH2; IDH1 |
| Fatty Acid Metabolism | ALDH1A1; CYP1B1 |
| Glycerophospholipid | PRDX6; CHKA |
| Metabolism | |
| Histidine Metabolism | PRMT5; ALDH1A1 |
| Inositol Metabolism | ERO1L; APEX1 |
| Metabolism of | GSTP1; CYP1B1 |
| Xenobiotics | |
| by Cytochrome p450 | |
| Methane Metabolism | PRDX6; PRDX1 |
| Phenylalanine | PRDX6; PRDX1 |
| Metabolism | |
| Propanoate Metabolism | ALDH1A1; LDHA |
| Selenoamino Acid | PRMT5; AHCY |
| Metabolism | |
| Sphingolipid Metabolism | SPHK1; SPHK2 |
| Aminophosphonate | PRMT5 |
| Metabolism | |
| Androgen and Estrogen | PRMT5 |
| Metabolism | |
| Ascorbate and Aldarate | ALDH1A1 |
| Metabolism | |
| Bile Acid Biosynthesis | ALDH1A1 |
| Cysteine Metabolism | LDHA |
| Fatty Acid Biosynthesis | FASN |
| Glutamate Receptor | GNB2L1 |
| Signaling | |
| NRF2-mediated | PRDX1 |
| Oxidative | |
| Stress Response | |
| Pentose Phosphate | GPI |
| Pathway | |
| Pentose and Glucuronate | UCHL1 |
| Interconversions | |
| Retinol Metabolism | ALDH1A1 |
| Riboflavin Metabolism | TYR |
| Tyrosine Metabolism | PRMT5, TYR |
| Ubiquinone Biosynthesis | PRMT5 |
| Valine, Leucine and | ALDH1A1 |
| Isoleucine Degradation | |
| Glycine, Serine and | CHKA |
| Threonine Metabolism | |
| Lysine Degradation | ALDH1A1 |
| Pain/Taste | TRPM5; TRPA1 |
| Pain | TRPM7; TRPC5; TRPC6; TRPC1; Cnr1; cnr2; Grk2; |
| | Trpa1; Pomc; Cgrp; Crf; Pka; Era; Nr2b; TRPM5; Prkaca; |
| | Prkacb; Prkar1a; Prkar2a |
| Mitochondrial Function | AIF; CytC; SMAC (Diablo); Aifm-1; Aifm-2 |
| Developmental | BMP-4; Chordin (Chrd); Noggin (Nog); WNT (Wnt2; |
| Neurology | |
| | Wnt2b; Wnt3a; Wnt4; Wnt5a; Wnt6; Wnt7b; Wnt8b; |
| | Wnt9a; Wnt9b; Wnt10a; Wnt10b; Wnt16); beta-catenin; |
| | Dkk-1; Frizzled related proteins; Otx-2; Gbx2; FGF-8; |
| | Reelin; Dab1; unc-86 (Pou4f1 or Brn3a); Numb; Reln |

[1511] Embodiments of the invention also relate to methods and compositions related to knocking out genes, amplifying genes and repairing particular mutations associated with DNA repeat instability and neurological disorders (Robert D. Wells, Tetsuo Ashizawa, Genetic Instabilities and Neurological Diseases, Second Edition, Academic Press, Oct. 13, 2011—Medical). Specific aspects of tandem repeat sequences have been found to be responsible for more than twenty human diseases (New insights into repeat instability: role of RNA-DNA hybrids. McIvor E I, Polak U, Napierala M. RNA Biol. 2010 September-October; 7(5):551-8). The present effector protein systems may be harnessed to correct these defects of genomic instability.

[1512] Several further aspects of the invention relate to correcting defects associated with a wide range of genetic diseases which are further described on the website of the National Institutes of Health under the topic subsection Genetic Disorders (website at health.nih.gov/topic/GeneticDisorders). The genetic brain diseases may include but are not limited to Adrenoleukodystrophy, Agenesis of the Corpus Callosum, Aicardi Syndrome, Alpers' Disease, Alzheimer's Disease, Barth Syndrome, Batten Disease, CADASIL, Cerebellar Degeneration, Fabry's Disease, Gerstmann-Straussler-Scheinker Disease, Huntington's Disease and other Triplet Repeat Disorders, Leigh's Disease, Lesch-Nyhan Syndrome, Menkes Disease, Mitochondrial Myopathies and NINDS Colpocephaly. These diseases are further described on the website of the National Institutes of Health under the subsection Genetic Brain Disorders.

### Cas9 Development and Use

[1513] The present invention may be further illustrated and extended based on aspects of CRISPR-Cas9 development and use as set forth in the following articles and particularly as relates to delivery of a CRISPR protein complex and uses of an RNA guided endonuclease in cells and organisms:
[1514] Multiplex genome engineering using CRISPR/Cas systems. Cong, L., Ran, F. A., Cox, D., Lin, S., Barretto, R., Habib, N., Hsu, P. D., Wu, X., Jiang, W., Marraffini, L. A., & Zhang, F. Science February 15; 339(6121): 819-23 (2013);
[1515] RNA-guided editing of bacterial genomes using CRISPR-Cas systems. Jiang W., Bikard D., Cox D., Zhang F, Marraffini L A. Nat Biotechnol March; 31(3):233-9 (2013);
[1516] One-Step Generation of Mice Carrying Mutations in Multiple Genes by CRISPR/Cas-Mediated Genome Engineering. Wang H., Yang H., Shivalila C S., Dawlaty M M., Cheng A W., Zhang F., Jaenisch R. Cell May 9; 153(4): 910-8 (2013);
[1517] Optical control of mammalian endogenous transcription and epigenetic states. Konermann S, Brigham M D, Trevino A E, Hsu P D, Heidenreich M, Cong L, Platt R J, Scott D A, Church G M, Zhang F. Nature. August 22; 500(7463): 472-6. doi: 10.1038/Nature12466. Epub 2013 Aug. 23 (2013);
[1518] Double Nicking by RNA-Guided CRISPR Cas9 for Enhanced Genome Editing Specificity. Ran, F A., Hsu, P D., Lin, C Y., Gootenberg, J S., Konermann, S., Trevino, A E., Scott, D A., Inoue, A., Matoba, S., Zhang, Y., & Zhang, F. Cell August 28. pii: S0092-8674(13)01015-5 (2013-A);
[1519] DNA targeting specificity of RNA-guided Cas9 nucleases. Hsu, P., Scott, D., Weinstein, J., Ran, F A., Konermann, S., Agarwala, V., Li, Y., Fine, E., Wu, X., Shalem, O., Cradick, T J., Marraffini, L A., Bao, G., & Zhang, F. Nat Biotechnol doi:10.1038/nbt.2647 (2013);
[1520] Genome engineering using the CRISPR-Cas9 system. Ran, F A., Hsu, P D., Wright, J., Agarwala, V., Scott, D A., Zhang, F. Nature Protocols November; 8(11):2281-308 (2013-B);
[1521] Genome-Scale CRISPR-Cas9 Knockout Screening in Human Cells. Shalem, O., Sanjana, N E., Hartenian, E., Shi, X., Scott, D A., Mikkelson, T., Heckl, D., Ebert, B L., Root, D E., Doench, J G., Zhang, F. Science December 12. (2013). [Epub ahead of print];
[1522] Crystal structure of cas9 in complex with guide RNA and target DNA. Nishimasu, H., Ran, F A., Hsu, P D., Konermann, S., Shehata, S I., Dohmae, N., Ishitani, R., Zhang, F., Nureki, O. Cell February 27, 156(5): 935-49 (2014);
[1523] Genome-wide binding of the CRISPR endonuclease Cas9 in mammalian cells. Wu X., Scott D A., Kriz A J., Chiu A C., Hsu P D., Dadon D B., Cheng A W., Trevino A E., Konermann S., Chen S., Jaenisch R., Zhang F., Sharp P A. Nat Biotechnol. April 20. doi: 10.1038/nbt.2889 (2014);
[1524] CRISPR-Cas9 Knockin Mice for Genome Editing and Cancer Modeling. Platt R J, Chen S, Zhou Y, Yim M J, Swiech L, Kempton H R, Dahlman J E, Parnas O, Eisenhaure T M, Jovanovic M, Graham D B, Jhunjhunwala S, Heidenreich M, Xavier R J, Langer R, Anderson D G, Hacohen N, Regev A, Feng G, Sharp P A, Zhang F. Cell 159(2): 440-455 DOI: 10.1016/j.cell.2014.09.014 (2014);
[1525] Development and Applications of CRISPR-Cas9 for Genome Engineering, Hsu P D, Lander E S, Zhang F., Cell. June 5; 157(6): 1262-78 (2014).
[1526] Genetic screens in human cells using the CRISPR/Cas9 system, Wang T, Wei J J, Sabatini D M, Lander E S., Science. January 3; 343(6166): 80-84. doi:10.1126/science.1246981 (2014);
[1527] Rational design of highly active sgRNAs for CRISPR-Cas9-mediated gene inactivation, Doench J G, Hartenian E, Graham D B, Tothova Z, Hegde M, Smith I, Sullender M, Ebert B L, Xavier R J, Root D E., (published online 3 Sep. 2014) Nat Biotechnol. December; 32(12):1262-7 (2014);
[1528] In vivo interrogation of gene function in the mammalian brain using CRISPR-Cas9, Swiech L, Heidenreich M, Banerjee A, Habib N, Li Y, Trombetta J, Sur M, Zhang F., (published online 19 Oct. 2014) Nat Biotechnol. January; 33(1):102-6 (2015);
[1529] Genome-scale transcriptional activation by an engineered CRISPR-Cas9 complex, Konermann S, Brigham M D, Trevino A E, Joung J, Abudayyeh O O, Barcena C, Hsu P D, Habib N, Gootenberg J S, Nishimasu H, Nureki O, Zhang F., Nature. January 29; 517(7536): 583-8 (2015).
[1530] A split-Cas9 architecture for inducible genome editing and transcription modulation, Zetsche B, Volz S E, Zhang F., (published online 2 Feb. 2015) Nat Biotechnol. February; 33(2):139-42 (2015);
[1531] Genome-wide CRISPR Screen in a Mouse Model of Tumor Growth and Metastasis, Chen S, Sanjana N E, Zheng K, Shalem O, Lee K, Shi X, Scott D A, Song J, Pan J Q, Weissleder R, Lee H, Zhang F, Sharp P A. Cell 160, 1246-1260, Mar. 12, 2015 (multiplex screen in mouse), and
[1532] In vivo genome editing using Staphylococcus aureus Cas9, Ran F A, Cong L, Yan W X, Scott D A, Gootenberg J S, Kriz A J, Zetsche B, Shalem O, Wu X, Makarova K S, Koonin E V, Sharp P A, Zhang F., (published online 1 Apr. 2015), Nature. April 9; 520(7546): 186-91 (2015).
   each of which is incorporated herein by reference, may be considered in the practice of the instant invention, and discussed briefly below:
   [1533] Cong et al. engineered type II CRISPR-Cas systems for use in eukaryotic cells based on both Streptococcus thermophilus Cas9 and also Streptococcus pyogenes Cas9 and demonstrated that Cas9 nucleases can be directed by short RNAs to induce precise cleavage of DNA in human and mouse cells. Their study further showed that Cas9 as converted into a nicking enzyme can be used to facilitate homology-directed repair in eukaryotic cells with minimal mutagenic activity. Additionally, their study demonstrated that multiple guide sequences can be encoded into a single CRISPR array to enable simultaneous editing of several at endogenous genomic loci sites within the mammalian genome, demonstrating easy programmability and wide applicability of the RNA-guided nuclease technology. This ability to use RNA to program sequence specific DNA cleavage in cells defined a new class of genome engineering tools. These studies further showed that other CRISPR loci are likely to be transplantable into mammalian cells and can also mediate mammalian genome cleavage. Importantly, it can be envisaged that several aspects of the CRISPR-Cas system can be further improved to increase its efficiency and versatility.
   [1534] Jiang et al. used the clustered, regularly interspaced, short palindromic repeats (CRISPR)-associated Cas9 endonuclease complexed with dual-RNAs to introduce precise mutations in the genomes of Streptococcus pneumoniae and Escherichia coli. The approach relied on dual-RNA:Cas9-directed cleavage at the targeted genomic site to kill unmutated cells and circumvents the need for selectable markers or counter-selection systems. The study reported reprogramming dual-RNA:Cas9 specificity by changing the sequence of short CRISPR RNA (crRNA) to make single- and multinucleotide changes carried on editing templates. The study showed that simultaneous use of two crRNAs enabled multiplex mutagenesis. Furthermore, when the approach was used in combination with recombineering, in S. pneumoniae, nearly 100% of cells that were recovered using the described approach contained the desired mutation, and in E. coli, 65% that were recovered contained the mutation.
   [1535] Wang et al. (2013) used the CRISPR-Cas system for the one-step generation of mice carrying mutations in multiple genes which were traditionally generated in multiple steps by sequential recombination in embryonic stem cells and/or time-consuming intercrossing of mice with a single mutation. The CRISPR-Cas system will greatly accelerate the in vivo study of functionally redundant genes and of epistatic gene interactions.
   [1536] Konermann et al. (2013) addressed the need in the art for versatile and robust technologies that enable optical and chemical modulation of DNA-binding domains based CRISPR Cas9 enzyme and also Transcriptional Activator Like Effectors
   [1537] Ran et al. (2013-A) described an approach that combined a Cas9 nickase mutant with paired guide RNAs to introduce targeted double-strand breaks. This addresses the issue of the Cas9 nuclease from the microbial CRISPR-Cas system being targeted to specific genomic loci by a guide sequence, which can tolerate certain mismatches to the DNA target and thereby promote undesired off-target mutagenesis. Because individual nicks in the genome are repaired with high fidelity, simultaneous nicking via appropriately offset guide RNAs is required for double-stranded breaks and extends the number of specifically recognized bases for target cleavage. The authors demonstrated that using paired nicking can reduce off-target activity by 50- to 1,500-fold in cell lines and to facilitate gene knockout in mouse zygotes without sacrificing on-target cleavage efficiency. This versatile strategy enables a wide variety of genome editing applications that require high specificity.
   [1538] Hsu et al. (2013) characterized SpCas9 targeting specificity in human cells to inform the selection of target sites and avoid off-target effects. The study evaluated >700 guide RNA variants and SpCas9-induced indel mutation levels at >100 predicted genomic off-target loci in 293T and 293FT cells. The authors that SpCas9 tolerates mismatches between guide RNA and target DNA at different positions in a sequence-dependent manner, sensitive to the number, position and distribution of mismatches. The authors further showed that SpCas9-mediated cleavage is unaffected by DNA methylation and that the dosage of SpCas9 and gRNA can be titrated to minimize off-target modification. Additionally, to facilitate mammalian genome engineering applications, the authors reported providing a web-based software tool to guide the selection and validation of target sequences as well as off-target analyses.
   [1539] Ran et al. (2013-B) described a set of tools for Cas9-mediated genome editing via non-homologous end joining (NHEJ) or homology-directed repair (HDR) in mammalian cells, as well as generation of modified cell lines for downstream functional studies. To minimize off-target cleavage, the authors further described a double-nicking strategy using the Cas9 nickase mutant with paired guide RNAs. The protocol provided by the authors experimentally derived guidelines for the selection of target sites, evaluation of cleavage efficiency and analysis of off-target activity. The studies showed that beginning with target design, gene modifications can be achieved within as little as 1-2 weeks, and modified clonal cell lines can be derived within 2-3 weeks.
   [1540] Shalem et al. described a new way to interrogate gene function on a genome-wide scale. Their studies showed that delivery of a genome-scale CRISPR-Cas9 knockout (GeCKO) library targeted 18,080 genes with 64,751 unique guide sequences enabled both negative and positive selection screening in human cells. First, the authors showed use of the GeCKO library to identify genes essential for cell viability in cancer and pluripotent stem cells. Next, in a melanoma model, the authors screened for genes whose loss is involved in resistance to vemurafenib, a therapeutic that inhibits mutant protein kinase BRAF. Their studies showed that the highest-ranking candidates included previously validated genes NF1 and MED12 as well as novel hits NF2, CUL3, TADA2B, and TADA1. The authors observed a high level of consistency between independent guide RNAs targeting the same gene and a high rate of hit confirmation, and thus demonstrated the promise of genome-scale screening with Cas9.
   [1541] Nishimasu et al. reported the crystal structure of Streptococcus pyogenes Cas9 in complex with sgRNA and its target DNA at 2.5 A° resolution. The structure revealed a bilobed architecture composed of target recognition and nuclease lobes, accommodating the sgRNA:DNA heteroduplex in a positively charged groove at their interface. Whereas the recognition lobe is essential for binding sgRNA and DNA, the nuclease lobe contains the HNH and RuvC nuclease domains, which are properly positioned for cleavage of the complementary and non-complementary strands of the target DNA, respectively. The nuclease lobe also contains a carboxyl-terminal domain responsible for the interaction with the protospacer adjacent motif (PAM). This high-resolution structure and accompanying functional analyses have revealed the molecular mechanism of RNA-guided DNA targeting by Cas9, thus paving the way for the rational design of new, versatile genome-editing technologies.
   [1542] Wu et al. mapped genome-wide binding sites of a catalytically inactive Cas9 (dCas9) from Streptococcus pyogenes loaded with single guide RNAs (sgRNAs) in mouse embryonic stem cells (mESCs). The authors showed that each of the four sgRNAs tested targets dCas9 to between tens and thousands of genomic sites, frequently characterized by a 5-nucleotide seed region in the sgRNA and an NGG protospacer adjacent motif (PAM). Chromatin inaccessibility decreases dCas9 binding to other sites with matching seed sequences; thus 70% of off-target sites are associated with genes. The authors showed that targeted sequencing of 295 dCas9 binding sites in mESCs transfected with catalytically active Cas9 identified only one site mutated above background levels. The authors proposed a two-state model for Cas9 binding and cleavage, in which a seed match triggers binding but extensive pairing with target DNA is required for cleavage.
   [1543] Platt et al. established a Cre-dependent Cas9 knockin mouse. The authors demonstrated in vivo as well as ex vivo genome editing using adeno-associated virus (AAV)-, lentivirus-, or particle-mediated delivery of guide RNA in neurons, immune cells, and endothelial cells.
   [1544] Hsu et al. (2014) is a review article that discusses generally CRISPR-Cas9 history from yogurt to genome editing, including genetic screening of cells.
   [1545] Wang et al. (2014) relates to a pooled, loss-of-function genetic screening approach suitable for both positive and negative selection that uses a genome-scale lentiviral single guide RNA (sgRNA) library.
   [1546] Doench et al. created a pool of sgRNAs, tiling across all possible target sites of a panel of six endogenous mouse and three endogenous human genes and quantitatively assessed their ability to produce null alleles of their target gene by antibody staining and flow cytometry. The authors showed that optimization of the PAM improved activity and also provided an on-line tool for designing sgRNAs.
   [1547] Swiech et al. demonstrate that AAV-mediated SpCas9 genome editing can enable reverse genetic studies of gene function in the brain.
   [1548] Konermann et al. (2015) discusses the ability to attach multiple effector domains, e.g., transcriptional activator, functional and epigenomic regulators at appropriate positions on the guide such as stem or tetraloop with and without linkers.
   [1549] Zetsche et al. demonstrates that the Cas9 enzyme can be split into two and hence the assembly of Cas9 for activation can be controlled.
   [1550] Chen et al. relates to multiplex screening by demonstrating that a genome-wide in vivo CRISPR-Cas9 screen in mice reveals genes regulating lung metastasis.
   [1551] Ran et al. (2015) relates to SaCas9 and its ability to edit genomes and demonstrates that one cannot extrapolate from biochemical assays.

[1552] Also, “Dimeric CRISPR RNA-guided FokI nucleases for highly specific genome editing”, Shengdar Q. Tsai, Nicolas Wyvekens, Cyd Khayter, Jennifer A. Foden, Vishal Thapar, Deepak Reyon, Mathew J. Goodwin, Martin J. Aryee, J. Keith Joung Nature Biotechnology 32(6): 569-77 (2014), relates to dimeric RNA-guided FokI Nucleases that recognize extended sequences and can edit endogenous genes with high efficiencies in human cells.

[1553] The present invention may be further illustrated and extended based on aspects of CRISPR-Cas9 development and use as set forth in the following articles and particularly as relates to delivery of a CRISPR protein complex and uses of an RNA guided endonuclease in cells and organisms and delivery of such components, including methods, materials, delivery vehicles, vectors, particles, AAV, and making and using thereof, including as to amounts and formulations, all useful in the practice of the instant invention, reference is made to: PCT Patent Publications PCT Patent Publications WO 2014/093661 (PCT/US2013/074743), WO 2014/093694 (PCT/US2013/074790), WO 2014/093595 (PCT/US2013/074611), WO 2014/093718 (PCT/US2013/074825), WO 2014/093709 (PCT/US2013/074812), WO 2014/093622 (PCT/US2013/074667), WO 2014/093635 (PCT/US2013/074691), WO 2014/093655 (PCT/US2013/074736), WO 2014/093712 (PCT/US2013/074819), WO 2014/093701 (PCT/US2013/074800), WO 2014/018423 (PCT/US2013/051418), WO 2014/204723 (PCT/US2014/041790), WO 2014/204724 (PCT/US2014/041800), WO 2014/204725 (PCT/US2014/041803), WO 2014/204726 (PCT/US2014/041804), WO 2014/204727 (PCT/US2014/041806), WO 2014/204728 (PCT/US2014/041808), WO 2014/204729 (PCT/US2014/041809).

[1554] Each of these patents, patent publications, and applications, and all documents cited therein or during their prosecution (“appln cited documents”) and all documents cited or referenced in the appln cited documents, together with any instructions, descriptions, product specifications, and product sheets for any products mentioned therein or in any document therein and incorporated by reference herein, are hereby incorporated herein by reference, and may be employed in the practice of the invention. All documents (e.g., these patents, patent publications and applications and the appln cited documents) are incorporated herein by reference to the same extent as if each individual document was specifically and individually indicated to be incorporated by reference.

[1555] The present invention will be further illustrated in the following Examples which are given for illustration purposes only and are not intended to limit the invention in any way.

### EXAMPLES

### Example 1

### Origin and Evolution of Adaptive Immunity Systems

[1556] Classification and Annotation of CRISPR-Cas Systems in Archaeal and Bacterial Genomes.

[1557] The CRISPR-Cas loci has more than 50 gene families and there is no strictly universal genes, fast evolution, extreme diversity of loci architecture. Therefore, no single tree feasible and a multi-pronged approach is needed. So far, there is comprehensive cas gene identification of 395 profiles for 93 Cas proteins. Classification includes signature gene profiles plus signatures of locus architecture

[1558] A new classification of CRISPR-Cas systems is proposed in FIG. 1. Class 2 includes multisubunit crRNA-effector complexes (Cascade) and Class 2 includes Single-subunit crRNA-effector complexes (Cas9-like). FIG. 2 provides a molecular organization of CRISPR-Cas. FIG. 3 provides structures of Type I and III effector complexes: common architecture/common ancestry despite extensive sequence divergence. FIG. 4 shows CRISPR-Cas as a RNA recognition motif (RRM)-centered system. FIG. 5 shows Cas1 phylogeny where recombination of adaptation and crRNA-effector modules show a major aspect of CRISPR-Cas evolution. FIG. F shows a CRISPR-Cas census, specifically a distribution of CRISPR-Cas types/subtypes among archaea and bacteria.

[1559] Cas1 is not always linked to CRISPR-Cas systems, therefore it may be possible that there are two branches of “solo” Cas1 which suggests there may be differences in function and origin and possible novel mobile elements (see Makarova, Krupovic, Koonin, Frontiers Genet 2014). The genome organization of three casposon families may provide some clues. In addition to Cas1 and PolB, casposons incorporate diverse genes including various nucleases (Krupovic et al. BMC Biology 2014). One family has protein-primed polymerase, another family has RNA-primed polymerase. In addition to diverse Euryarchaeota and Thaumarchaeota, casposons found in several bacteria which suggests horizontal mobility. Casposon Cas1 (transposase/integrase) suggests a basal clade in the Cas1 phylogeny.

[1560] Bacteria and archae utilize CRISPR for adaptive immunity in procaryotes and eukaryotes via genome manipulation. Cas 1 provides a ready made tool for genome manipulation. There are similar mechanisms of integration in casposons and CRISPR, specifically replication-dependent acquisition by copy/paste not cut-and-paste (Krupovic et al. BMC Biology 2014). Cas1 is a bona fide integrase (Nunez J K, Lee A S, Engelman A, Doudna J A. Integrase-mediated spacer acquisition during CRISPR-Cas adaptive immunity. Nature. 2015 Feb. 18). There is similarity between terminal inverted repeats of casposons and CRISPR (Krupovic et al. BMC Biology 2014). CRISPR-Cas may have originated from a casposon and an innate immunity locus (Koonin, Krupovic, Nature Rev Genet, 2015). The evolution of adaptive immunity systems in prokaryotes and animals may have been along parallel courses with transposon integration at innate immunity loci (Koonin, Krupovic, Nature Rev Genet, 2015). RAG1 transposase (the key enzyme of V(D)J recombination in vertebrates) may have originated from Transib transposons (Kapitonov V V, Jurka J. RAG1 core and V(D)J recombination signal sequences were derived from Transib transposons. PLoS Biol. 2005 June; 3(6):e181), however, none of the Transibs encodes RAG2. RAG1 and RAG2 encoding transposons are described in Kapitonov, Koonin, Biol Direct 2015 and Transib transposase phylogeny is presented in Kapitonov, Koonin, Biol Direct 2015. Defensive DNA elimination in ciliates evolved from a PiggyMAc transposon and RNAi, an innate immune system (Swart E C, Nowacki M. The eukaryotic way to defend and edit genomes by sRNA-targeted DNA deletion. Ann N Y Acad Sci. 2015).

[1561] The relative stability of the classification implies that the most prevalent variants of CRISPR-Cas systems are already known. However, the existence of rare, currently unclassifiable variants implies that additional types and subtypes remain to be characterized (Makarova et al. 2015. Evolutionary classification of CRISPR-Cas systems and cas genes).

[1562] Transposons play a key contribution to the evolution of adaptive immunity and other systems involved in DNA manipulation. Class 1 CRISPR-Cas originate from transposons but only for an adaptation module. Class 2 CRISPR-Cas have both adaptation and effector functions where modules may have evolved from different transposons.

### Example 2

### New Predicted Class 2 CRISPR-Cas Systems and Evidence of their Independent Origins from Transposable Elements

[1563] The CRISPR-Cas systems of bacterial and archaeal adaptive immunity show extreme diversity of protein composition and genomic loci architecture. These systems are broadly divided into two classes, Class 1 with multisubunit effector complexes and Class 2 with single-subunit effector modules exemplified by the Cas9 protein. Applicants developed a simple computational pipeline for prediction of putative new Class 2 CRISPR-Cas systems. Analysis of the database of complete bacterial genomes using this pipeline resulted in the identification of two new variants, each represented in diverse bacteria and containing cas1 and cas2 genes along with a third gene encoding a large protein predicted to function as the effector module. In the first of these loci, the putative effector protein (C2c1p) contains a RuvC-like nuclease domain and resembles the previously described Cpf1 protein, the predicted effector of Type V CRISPR-Cas systems; accordingly, the new putative system is classified as subtype V-B. In depth comparison of protein sequences suggests that the RuvC-containing effector proteins, Cas9, Cpf1 and C2C1p independently evolved from different groups of transposon-encoded TnpB proteins. The second group of new putative CRISPR-Cas loci encompasses a large protein containing two highly diverged HEPN domains with predicted RNAse activity. Given the novelty of the predicted effector protein, these loci are classified as new Type VI CRISPR-Cas that is likely to target mRNA. Together, the results of this analysis show that Class 2 CRISPR-Cas systems evolved on multiple, independent occasions, by combination of diverse Cas1-Cas2-encoding adaptation modules with effector proteins derived from different mobile elements. This route of evolution most likely produced multiple variants of Class 2 systems that remain to be discovered.

[1564] The CRISPR-Cas adaptive immunity systems are present in ˜45% bacterial and ˜90% archaeal genomes and show extreme diversity of Cas protein composition and sequence, and genomic loci architecture. Based on the structural organization of their crRNA-effector complexes, these systems are divided into two classes, namely class 1, with multisubunit effector complexes, and class 2, with single subunit effector complexes (Makarova, 2015). Class 1 systems are much more common and diverse than Class 2 systems. Class 1 currently is represented by 12 distinct subtypes encoded by numerous archaeal and bacterial genomes, whereas class 2 systems include three subtypes of Type II system and the putative Type V that collectively are found in about 10% of sequenced bacterial genomes (with a single archaeal genome encompassing a putative Type system). Class 2 systems typically contain only three or four genes in the cas operon, namely the cas1-cas2 pair of genes that are involved in adaptation but not in interference, a single multidomain effector protein that is responsible for interference but also contributes to the pre-crRNA processing and adaptation, and often a fourth gene with uncharacterized functions that is dispensable in at least some Type II systems. In most cases, a CRISPR array and a gene for a distinct RNA species known as tracrRNA (trans-encoded small CRISPR RNA) are adjacent to Class 2 cas operons (Chylinski, 2014). The tracrRNA is partially homologous to the repeats within the respective CRISPR array and is essential for the processing of pre-crRNA that is catalyzed by RNAse III, a ubiquitous bacterial enzyme that is not associated with the CRISPR-cas loci (Deltcheva, 2011) (Chylinski, 2014; Chylinski, 2013).

[1565] The Type II multidomain effector protein Cas9 has been functionally and structurally characterized in exquisite detail. In different bacteria, Cas9 proteins encompass between about 950 and 1,400 amino acids and contain two nuclease domains, namely a RuvC-like (RNase H fold) and HNH (McrA-like) nucleases (Makarova, 2011). The crystal structure of Cas9 reveals a bilobed organization of the protein, with distinct target recognition and nuclease lobes, with the latter accommodating both the RuvC and the HNH domains (Nishimasu, 2014) (Jinek, 2014). Each of the nuclease domains of Cas9 is required for the cleavage of one of the target DNA strands (Jinek, 2012; Sapranauskas, 2011). Recently, Cas9 has been shown to contribute to all three stages of the CRISPR response, that is not only target DNA cleavage (interference) but also adaptation and pre-crRNA processing (Jinek, 2012). More specifically, a distinct domain in the nuclease lobe of Cas9 has been shown to recognize and bind the Protospacer-Associated Motif (PAM) in viral DNA during the adaptation stage (Nishimasu, 2014) (Jinek, 2014) (Heler, 2015; Wei, 2015). At this stage of the CRISPR response, Cas9 forms a complex with Cas1 and Cas2, the two proteins that are involved in spacer acquisition in all CRISPR-Cas systems (Heler, 2015; Wei, 2015).

[1566] The Cas9 protein, combined with tracrRNA, has recently become the key tool for the new generation of genome editing and engineering methods (Gasiunas, 2013; Mali, 2013; Sampson, 2014; Cong, 2015). This utility of Cas9 in genome editing hinges on the fact that in Type II CRISPR-Cas systems, unlike other types of CRISPR-Cas systems, all the activities required for the target DNA recognition and cleavage are assembled within a single, albeit large, multidomain protein. This feature of Type II systems greatly facilitates the design of efficient tools for genome manipulation. Importantly, not all variants of Cas9 are equal. Most of the work so far has been done with Cas9 from Streptococcus pyogenes but other Cas9 species could offer substantial advantages. As a case in point, recent experiments with Cas9 from Staphylococcus aureus that is about 300 amino acids shorter than the S. pyogenes protein have allowed Cas9 packaging into the adeno-associated virus vector, resulting in a major enhancement of CRISPR-Cas utility for genome editing in vivo (Ran, 2015).

[1567] Type II CRISPR-Cas systems currently are classified into 3 subtypes (II-A, II-B and II-C) (Makarova, 2011) (Fonfara, 2014; Chylinski, 2013; Chylinski, 2014). In addition to the cas1, cas2 and cas9 genes that are shared by all Type II loci, subtype II-A is characterized by an extra gene, csn2, that encodes an inactivated ATPase (Nam, 2011; Koo, 2012; Lee, 2012) that plays a still poorly characterized role in spacer acquisition (Barrangou, 2007; Arslan, 2013) (Heler, 2015). Subtype II-B systems lack csn2 but instead contains the cas4 gene that is otherwise typical of Type I systems and encodes a recB family 5′-3′ exonuclease that contributes to spacer acquisition by generating recombinogeneci DNA ends (Zhang, 2012) (Lemak, 2013; Lemak, 2014). The cas1 and cas2 genes of subtype II-B are most closely related to the respective proteins of Type I CRISPR-Cas systems which implies a recombinant origin of this Type II subtype (Chylinski, 2014).

[1568] Subtype II-C CRISPR-Cas systems are the minimal variety that consists only of the cas1, cas2 and cas9 genes (Chylinski, 2013; Koonin, 2013; Chylinski, 2014). Notably, however, it has been shown that in Campylobacter jejuni spacer acquisition by the Type II-C systems requires the participation of Cas4 encoded by a bacteriophage (Hooton, 2014). Another distinct feature of subtype II-C is the formation of some of the crRNAs by transcription involves transcription from internal alternative promoters as opposed to processing observed in all other experimentally characterized CRISPR-Cas systems (Zhang, 2013).

[1569] Recently, the existence of Type V CRISPR-Cas systems has been predicted by comparative analysis of bacterial genomes. These putative novel CRISPR-Cas systems are represented in several bacterial genomes, in particular those from the genus Francisella and one archaeon, Methanomethylophilus alvus (Vestergaard, 2014). All putative Type V loci encompass cas1, cas2, a distinct gene denoted cpf1 and a CRISPR array (Schunder, 2013) (Makarova, 2015). Cpf1 is a large protein (about 1300 amino acids) that contains a RuvC-like nuclease domain homologous to the corresponding domain of Cas9 along with a counterpart to the characteristic arginine-rich cluster of Cas9. However, Cpf1 lacks the HNH nuclease domain that is present in all Cas9 proteins, and the RuvC-like domain is contiguous in the Cpf1 sequence, in contrast to Cas9 where it contains long inserts including the HNH domain (Chylinski, 2014; Makarova, 2015). These major differences in the domain architectures of Cas9 and Cpf1 suggest that the Cpf1-containing systems should be classified as a new type. The composition of the putative Type V systems implies that Cpf1 is a single-subunit effector complex, and accordingly, these systems are assigned to Class 2 CRISPR-Cas. Some of the putative Type V loci encode Cas4 and accordingly resemble subtype II-B loci, whereas others lack Cas4 and thus are analogous to subtype II-C.

[1570] It has been shown that the closest homologs of Cas9 and Cpf1 proteins are TnpB proteins that are encoded in IS605 family transposons and contain the RuvC-like nuclease domain as well as a Zn-finger that has a counterpart in Cpf1. In addition, homologs of TnpB have been identified that contain a HNH domain inserted into the RuvC-like domain and show high sequence similarity to Cas9. The role of TnpB in transposons remains uncertain as it has been shown that this protein is not required for transposition.

[1571] Given the homology of Cas9 and Cpf1 to transposon-encoded proteins, Applicants hypothesized that Class 2 CRISPR-Cas systems could have evolved on multiple occasions as a result of recombination between a transposon and a cas1-cas2 locus. Accordingly, Applicants devised a simple computational strategy to identify genomic loci that could be candidates for novel variants of Class 2. Here Applicants describe the first application of this approach that resulted in the identification of two groups of such candidates one of which appears to be a distinct subtype of Type V whereas the second one seems to qualify at Type VI. The new variants of Class 2 CRISPR-Cas systems are of obvious interest as potential tools for genome editing and expression regulation.

[1572] Database Search Strategy for Detection of Candidate Novel Class 2 CRISPR-Cas Loci.

[1573] Applicants implemented a straightforward computational approach to identify candidate novel Class 2 CRISPR-Cas systems (FIG. 7. Pipeline). Because the vast majority of the CRISPR-Cas loci encompass a cas1 gene (Makarova, 2011; Makarova, 2015) and the Cas1 sequence is the most highly conserved one among all Cas proteins (Takeuchi, 2012), Applicants reasoned that cas1 is the best possible anchor to identify candidate new loci using translating PSI-BLAST search with Cas1 profiles. After detecting all contigs encoding Cas1, the protein-coding genes were predicted using GenemarkS within the 20 KB regions upstream and downstream of the cas1 gene. These predicted genes were annotated using the NCBI CDD and Cas protein-specific profiles, and CRISPR arrays were predicted using the PILER-CR program. This procedure provided for assignment of the detected CRISPR-Cas loci to the known subtypes. Unclassified candidate CRISPR-Cas loci containing large (>500 aa) proteins were selected as candidates for novel Class 2 systems given the characteristic presence of such proteins in Types II and V (Cas9 and Cpf1, respectively). All 34 candidate loci detected using this criteria were analyzed on a case by case basis using PSI-BLAST and HHpred. The protein sequences encoded in the candidate loci were farther used as queries to search metagenomic databases for additional homologs, and long contigs detected in these searches were analyzed as indicated above. This analysis pipeline yielded two groups of loci strong links to CRISPR-Cas systems.

[1574] Putative Type V-B System.

[1575] The first group of candidate loci, provisionally denoted named C2c1 (Class 2 candidate 1), is represented in bacterial genomes from four major phyla, including Bacilli, Verrucomicrobia, alpha-proteobacteria and delta-proteobacteria (FIG. 8 “Organization of complete loci of Class 2 systems”). All C2c1 loci encode a Cas1-Cas4 fusion, Cas2, and the large protein that Applicants denote C2c1p, and typically, are adjacent to a CRISPR array (FIG. 9, C2c1 neighborhoods). In the phylogenetic tree of Cas1, the respective Cas1 proteins cluster with Type I-U system (FIG. 10, Cas1 tree), the only one in which the Cas1-Cas4 fusion is found. The C2c1p proteins consists of approximately 1200 amino acids, and HHpred search detected significant similarity between the C-terminal portion of this protein and a subset of TnpB proteins encoded in transposons of the IS605 family. In contrast, no significant similarity was detected between C2c1p and Cas9 or Cpf1 that are similar to other groups of TnpB proteins (Chylinski, 2014) (Makarova, 2015; Makarova, 2015). Thus, the domain architecture of C2c1p is similar to that of Cpf1 and distinct from that of Cas9 although all three Cas proteins seem to have evolved from the TnpB family (FIG. 11 “Domain organization of class 2 families”). The N-terminal region of C2c1p shows no significant similarity to other proteins. Secondary structure prediction indicates that this region adopts mostly alpha-helical conformation. The two segments of similarity with TnpB encompass the three catalytic motifs of the RuvC-like nuclease, with the D..E..D signature (FIG. 12, “TnpB homology regions in Class 2 proteins”); the region corresponding to the bridge helix (also known as arginine-rich cluster) that in Cas9 protein is involved in crRNA-binding; and a small region that appears to be the counterpart to the Zn finger of TnpB (however, the Zn-binding cysteine residues are replaced in C2C1p indicating that this protein does not bind zinc). The similarity of the domain architectures of C2c1p and Cpf1 suggests that the C2c1 loci are best classified as Subtype V-B in which case the Cpf1-encoding loci become Subtype V-A.

[1576] Despite similarity of cas1 genes associated with this system, the CRISPR repeats in the respective arrays are highly heterogeneous although all of them are 36-37 bp long and can be classified as unstructured (folding energy, ΔG, is −0.5-4.5 kcal/mole whereas highly palindromic CRISPR have AG below −7). According to the CRISPRmap (Lange, 2013) classification scheme, several of the Subtype V-B repeats share some sequence or structural similarity with Type II repeats.

[1577] Considering the possibility that the putative Subtype V-B CRISPR-Cas systems are mechanistically analogous to Type II systems, Applicants attempted to identify the tracrRNA in the respective genomic loci

[1578] Comparison of the spacers from the Type V-B CRISPR arrays to the non-redundant nucleotide sequence database identified several matches to various bacterial genomes. The relevance of these matches is difficult to assess, considering that no phages are known for the bacteria that harbor putative Type V-B CRISPR-Cas systems.

[1579] Putative Type VI Systems.

[1580] The second group of candidate CRISPR-Cas loci, denoted C2c2, was identified in genomes from 5 major bacterial phyla, alpha-proteobacteria, Bacilli, Clostridia, Fusobacteria and Bacteroidetes (FIG. 8 “Organization of complete loci of Class 2 systems”). Similar to c2c1, the C2c2 loci encompass cas1 and cast genes along with a large protein (C2c2p) and a CRISPR array; however, unlike C2c1, C2c2p is often encoded next to a CRISPR array but not cas1-cas2 (FIG. 13, C2c2 neighborhoods). In the phylogenetic tree of Cas1, the Cas1 proteins from the C2c2 loci are distributed among two clades. The first clade includes Cas1 from Clostridia and is located within the Type II subtree along with a small Type III-A branch (FIG. 10, Cas1 tree). The second clade consists of Cas1 proteins from C2c2 loci of Leptotrichia and is lodged inside a mixed branch that mostly contains Cas1 proteins from Type III-A CRISPR-Cas systems. Database searches using HHpred and PSI-BLAST detected no sequence similarity between C2c2p and other proteins. However, inspection of multiple alignments of C2c2p protein sequences led to the identification of two strictly conserved RxxxxH motifs that are characteristic of HEPN domains (Anantharaman, 2013). Secondary structure predictions indicates that these motifs are located within structural contexts compatible with the HEPN domain structure as is the overall secondary structure prediction for the respective portions of C2c2p. The HEPN domains are small (˜150 aa) alpha helical domains that have been shown or predicted to possess RNAse activity and are often associated with various defense systems (Anantharaman, 2013) (FIG. 14, HEPN RxxxxH motif in C2c2 family). The sequences of HEPN domains show little conservation except for the catalytic RxxxxH motif. Thus, it appears likely that C2c2p contains two active HEPN domains. The HEPN domain is not new to CRISPR-Cas systems as it is often associated with the CARF (CRISPR-Associated Rossmann Fold) domain in Csm6 and Csx1 proteins that are present in many Type III CRISPR-Cas systems (Makarova, 2014). These proteins do not belong to either the adaptation modules or effector complexes but rather appear to be components of the associated immunity module that is present in the majority of CRISPR-Cas systems and is implicated in programmed cell death as well as regulatory functions during the CRISPR response (Koonin, 2013; Makarova, 2012; Makarova, 2013). However, C2c2p differs from Csm6 and Csx1 in that this much larger protein is the only one encoded in the C2c2 loci, except for Cas1 and Cas2. Thus, it appears likely that C2c2p is the effector of these putative novel CRISPR-Cas systems and the HEPN domains are the catalytic moieties thereof. Outside of the predicted HEPN domains, the C2c1p sequence showed no detectable similarity to other proteins and is predicted to adopt a mixed alpha/beta secondary structure.

[1581] The CRISPR arrays in the C2c2 loci are highly heterogeneous, with the length of 35 to 39 bp, and unstructured (folding energy of −0.9 to 4.7 kcal/mole). According to CRISPRmap (Lange, 2013), these CRISPR do not belong to any of the established structural classes and are assigned to 3 of the 6 superclasses. Only the CRISPR from Listeria seeligeri was assigned to the sequence family 24 that is usually associated with Type II-C systems.

[1582] Spacer analysis of the C2c2 loci identified one 30 nucleotide region identical to a genomic sequence from Listeria weihenstephanensis and two imperfect hits to bacteriophage genomes.

[1583] Given the unique predicted effector complex of C2c2, these systems seem to qualify as a putative Type VI CRISPR-Cas. Furthermore, taking into account that all experimentally characterized and enzymatically active HEPN domains are RNAses, Type VI systems are likely to act at the level of mRNA.

[1584] Applicants applied a simple, straightforward computational strategy to predict new Class 2 CRISPR-cas systems. The previously described class 2 systems, namely Type II and the putative Type V, consisted of the cas1 and cas2 genes (and in some cases also cas4) comprising the adaptation module and a single large protein that comprises the effector module. Therefore, Applicants surmised that any genomic locus containing cas1 and a large protein could be a potential candidate for a novel Class 2 system that merits detailed investigation. Such analysis using sensitive methods for protein sequence comparison led to the identification of two strong candidates one of which is a subtype of the previously described putative Type V whereas the other one qualifies as a new putative Type VI, on the strength of the presence of a presence of a novel predicted effector protein. Many of these new systems occur in bacterial genomes that encompass no other CRISPR-Cas loci suggesting that Type V and Type VI systems can function autonomously.

[1585] Combined with the results of previous analyses, (Chylinski, 2014; Makarova, 2011), the identification of the putative Type V-B reveals the dominant theme in the evolution of Class 2 CRISPR-Cas systems. The effector proteins of all currently known systems of this class appear to have evolved from the pool of transposable elements that encode TnpB proteins containing the RuvC-like domain. The sequences of the RuvC-like domains of TnpB and the homologous domains of the Class 2 effector proteins are too diverged for reliable phylogenetic analysis. Nevertheless, for Cas9, the effector protein of Type II systems, the specific ancestor seems to be readily identifiable, namely a family of TnpB-like proteins, particularly abundant in Cyanobacteria, that show a relatively high sequence similarity to Cas9 and share with it the entire domain architecture, namely the RuvC-like and HNH nuclease domains and the arginine-rich bridge helix (Chylinski, 2014) (FIG. 11, “Domain organization of class 2 families”; FIG. 12, “TnpB homology regions in Class 2 proteins”). Unlike Cas9, it was impossible to trace Cpf1 and C2c1 to a specific TnpB family; despite the conservation of all motifs centered at the catalytic residues of the RuvC-like nucleases, these proteins show only a limited similarity to generic profiles of the TnpB. However, given that C2c1p shows no detectable sequence similarity with Cpf1, contains distinct insertions between the RuvC-motifs and clearly unrelated N-terminal regions, it appears most likely that Cpf1 and C2c1 originated independently from different families within the pool of TnpB-encoding elements.

[1586] It is intriguing that the TnpB proteins seem to be “predesigned” for utilization in Class 2 CRISPR-Cas effector complexes such that they apparently have been recruited on multiple different occasions. Conceivably, such utility of TnpB proteins has to do with their predicted ability to cut a single-stranded DNA while bound to a RNA molecule via the R-rich bridge helix that in Cas9 has been shown to bind crRNA (Jinek, 2014; Nishimasu, 2014). The functions of TnpB are poorly understood. This protein is not required for transposition, and in one case, has been shown to down-regulate transposition (Pasternak, 2013) but their mechanism of action remains unknown. Experimental study of TnpB is likely to shed light on the mechanistic aspects of the Class 2 CRISPR-Cas systems. It should be noted that the mechanisms of Cpf1 and C2c1 could be similar to each other but are bound to substantially differ from that of Cas9 because the former two proteins lack the HNH domain that in Cas9 is responsible for nicking one of the target DNA strands (Gasiunas, 2012) (Jinek, 2012) (Chen, 2014). Accordingly, exploitation of Cpf1 and C2c1 might bring additional genome editing possibilities.

[1587] In evolutionary terms, it is striking that Class 2 CRISPR-Cas appear to be completely derived from different transposable elements given the recent evidence on the likely origin of cas1 genes from a distinct transposon family (Koonin, 2015; Krupovic, 2014). Furthermore, the likely independent origin of the effector proteins from different families of TnpB, along with the different phylogenetic affinities of the respective cas1 proteins, strongly suggest that Class 2 systems have evolved on multiple occasions through the combination of various adaptation modules and transposon-derived nucleases giving rise to effector proteins. This mode of evolution appears to be the ultimate manifestation of the modularity that is characteristic of CRISPR-Cas evolution (Makarova, 2015), with the implication that additional combinations of adaptation and effector module are likely to exist in nature.

[1588] The putative Type VI CRISPR-Cas systems encompass a predicted novel effector protein that contains two predicted HEPN domain that are likely to possess RNAse activity. The HEPN domains are not parts of the effector complexes in other CRISPR-Cas systems but are involved in a variety of defense functions including a predicted ancillary role in various CRISPR-Cas systems (Anantharaman, 2013) (Makarova, 2015). The presence of the HEPN domains as the catalytic moiety of the predicted effector module implies that the Type VI systems target and cleave mRNA. Previously, mRNA targeting has been reported for certain Type III CRISPR-Cas systems (Hale, 2014; Hale, 2009) (Peng, 2015). Although HEPN domains so far have not been detected in bona fide transposable elements, they are characterized by high horizontal mobility and are integral to mobile elements such as toxin-antitoxin units (Anantharaman, 2013). Thus, the putative Type VI systems seem to fit the general paradigm of the modular evolution of Class 2 CRISPR-Cas from mobile components, and additional variants and new types are expected to be discovered by analysis of genomic and metagenomics data.

[1589] Modular evolution is a key feature of CRISPR-Cas systems. This mode of evolution appears to be most pronounced in Class 2 systems that evolve through the combination of adaptation modules from various other CRISPR-Cas systems with effector proteins that seem to be recruited from mobile elements on multiple independent occasions. Given the extreme diversity of mobile elements in bacteria, it appears likely that effector modules of Class 2 CRISPR-Cas systems are highly diverse as well. Here Applicants employed a simple computational approach to delineate two new variants of CRISPR-Cas systems but many more are likely to exist bacterial genomes that have not yet been sequenced. Although most if not all of these new CRISPR-Cas systems are expected to be rare, they could employ novel strategies and molecular mechanisms and would provide a major resource for new applications in genome engineering and biotechnology.

[1590] TBLASTN program was used to search with Cas1 profile as a query against NCBI WGS database. Sequences of contigs or complete genome partitions where Cas1 hit has been identified where retrieved from the same database. The region around the Cas1 gene was cut out and translated using GENMARK. Predicted proteins for each were searched against a collection of profiles from CDD database (Marchler-Bauer, 2009) and specific Cas profiles available at FTP, with hit priority to Cas proteins. Procedure to identify completeness of CRISPR loci developed previously has been applied to each locus.

[1591] CRISPRmap (Lange, 2013) was used for repeat classification.

[1592] Iterative profile searches with the PSI-BLAST (Altschul, 1997) and composition based-statistics and low complexity filtering turned off, were used to search for distantly similar sequences both NCBI's non-redundant (NR) database. Each identified non-redundant protein was searched against WGS using TBLAST program. HHpred was used with default parameters was used to identify remote sequence similarity (Soding, 2005). Multiple sequence alignments were constructed using MUSCLE (Edgar, 2004). Protein secondary structure was predicted using Jpred 4 (Drozdetskiy, 2015).

[1593] Chosen Gene Candidates

Gene ID: A; Gene Type: C2C1; Organism: 5.
Opitutaceae bacterium TAV5;
Spacer Length-mode (range): 34 (33 to 37);
DR1:
(SEQ ID NO: 27)
GCCGCAGCGAAUGCCGUUUCACGAAUCGUCAGGCGG;
DR2:
none;
tracrRNA1:
(SEQ ID NO: 28)
GCUGGAGACGUUUUUUGAAACGGCGAGUGCUGCGGAUAGCGAGUUUCUCU
UGGGGAGGCGCUCGCGGCCACUUUU;
tracrRNA2:
none;
Protein Sequence:
(SEQ ID NO: 29)
MSLNRIYQGRVAAVETGTALAKGNVEWMPAAGGDEVLWQHHELFQAAINY
YLVALLALADKNNPVLGPLISQMDNPQSPYHVWGSFRRQGRQRTGLSQAV
APYITPGNNAPTLDEVFRSILAGNPTDRATLDAALMQLLKACDGAGAIQQ
EGRSYWPKFCDPDSTANFAGDPAMLRREQHRLLLPQVLHDPAITHDSPAL
GSFDTYSIATPDTRTPQLTGPKARARLEQAITLWRVRLPESAADFDRLAS
SLKKIPDDDSRLNLQGYVGSSAKGEVQARLFALLLFRHLERSSFTLGLLR
SATPPPKNAETPPPAGVPLPAASAADPVRIARGKRSFVFRAFTSLPCWHG
GDNIHPTWKSFDIAAFKYALTVINQIEEKTKERQKECAELETDFDYMHGR
LAKIPVKYTTGEAEPPPILANDLRIPLLRELLQNIKVDTALTDGEAVSYG
LQRRTIRGFRELRRIWRGHAPAGTVFSSELKEKLAGELRQFQTDNSTTIG
SVQLFNELIQNPKYWPIWQAPDVETARQWADAGFADDPLAALVQEAELQE
DIDALKAPVKLTPADPEYSRRQYDFNAVSKFGAGSRSANRHEPGQTERGH
NTFTTEIAARNAADGNRWRATHVRIHYSAPRLLRDGLRRPDTDGNEALEA
VPWLQPMMEALAPLPTLPQDLTGMPVFLMPDVTLSGERRILLNLPVTLEP
AALVEQLGNAGRWQNQFFGSREDPFALRWPADGAVKTAKGKTHIPWHQDR
DHFTVLGVDLGTRDAGALALLNVTAQKPAKPVHRIIGEADGRTWYASLAD
ARMIRLPGEDARLFVRGKLVQEPYGERGRNASLLEWEDARNIILRLGQNP
DELLGADPRRHSYPEINDKLLVALRRAQARLARLQNRSWRLRDLAESDKA
LDEIHAERAGEKPSPLPPLARDDAIKSTDEALLSQRDIIRRSFVQIANLI
LPLRGRRWEWRPHVEVPDCHILAQSDPGTDDTKRLVAGQRGISHERIEQI
EELRRRCQSLNRALRHKPGERPVLGRPAKGEEIADPCPALLEKINRLRDQ
RVDQTAHAILAAALGVRLRAPSKDRAERRHRDIHGEYERFRAPADFVVIE
NLSRYLSSQDRARSENTRLMQWCHRQIVQKLRQLCETYGIPVLAVPAAYS
SRFSSRDGSAGFRAVHLTPDHRHRMPWSRILARLKAHEEDGKRLEKTVLD
EARAVRGLFDRLDRFNAGHVPGKPWRTLLAPLPGGPVFVPLGDATPMQAD
LNAAINIALRGIAAPDRHDIHHRLRAENKKRILSLRLGTQREKARWPGGA
PAVTLSTPNNGASPEDSDALPERVSNLFVDIAGVANFERVTIEGVSQKFA
TGRGLWASVKQRAWNRVARLNETVTDNNRNEEEDDIPM
Gene ID: B; Gene Type: C2C1; Organism: 7.
Bacillus thermoamylovorans strain B4166;
Spacer Length-mode (range): 37 (35-38);
DR1:
(SEQ ID NO: 30)
GUCCAAGAAAAAAGAAAUGAUACGAGGCAUUAGCAC;
DR2:
none;
tracrRNA1:
(SEQ ID NO: 31)
CUGGACGAUGUCUCUUUUAUUUCUUUUUUCUUGGAUCUGAGUACGAGCAC
CCACAUUGGACAUUUCGCAUGGUGGGUGCUCGUACUAUAGGUAAAACAAA
CCUUUUU;
tracrRNA2:
none;
Protein Sequence:
(SEQ ID NO: 32)
MATRSFILKIEPNEEVKKGLWKTHEVLNHGIAYYMNILKLIRQEAIYEHH
EQDPKNPKKVSKAEIQAELWDFVLKMQKCNSFTHEVDKDVVFNILRELYE
ELVPSSVEKKGEANQLSNKFLYPLVDPNSQSGKGTASSGRKPRWYNLKIA
GDPSWEEEKKKWEEDKKKDPLAKILGKLAEYGLIPLFIPFTDSNEPIVKE
IKWMEKSRNQSVRRLDKDMFIQALERFLSWESWNLKVKEEYEKVEKEHKT
LEERIKEDIQAFKSLEQYEKERQEQLLRDTLNTNEYRLSKRGLRGWREII
QKWLKMDENEPSEKYLEVFKDYQRKHPREAGDYSVYEFLSKKENHFIWRN
HPEYPYLYATFCEIDKKKKDAKQQATFTLADPINHPLWVRFEERSGSNLN
KYRILTEQLHTEKLKKKLTVQLDRLIYPTESGGWEEKGKVDIVLLPSRQF
YNQIFLDIEEKGKHAFTYKDESIKFPLKGTLGGARVQFDRDHLRRYPHKV
ESGNVGRIYFNMTVNIEPTESPVSKSLKIHRDDFPKFVNFKPKELTEWIK
DSKGKKLKSGIESLEIGLRVMSIDLGQRQAAAASIFEVVDQKPDIEGKLF
FPIKGTELYAVHRASFNIKLPGETLVKSREVLRKAREDNLKLMNQKLNFL
RNVLHFQQFEDITEREKRVTKWISRQENSDVPLVYQDELIQIRELMYKPY
KDWVAFLKQLHKRLEVEIGKEVKHWRKSLSDGRKGLYGISLKNIDEIDRT
RKFLLRWSLRPTEPGEVRRLEPGQRFAIDQLNHLNALKEDRLKKMANTII
MHALGYCYDVRKKKWQAKNPACQIILFEDLSNYNPYEERSRFENSKLMKW
SRREIPRQVALQGEIYGLQVGEVGAQFSSRFHAKTGSPGIRCSVVTKEKL
QDNRFFKNLQREGRLTLDKIAVLKEGDLYPDKGGEKFISLSKDRKLVTTH
ADINAAQNLQKRFWTRTHGFYKVYCKAYQVDGQTVYIPESKDQKQKIIEE
FGEGYFILKDGVYEWGNAGKLKIKKGSSKQSSSELVDSDILKDSFDLASE
LKGEKLMLYRDPSGNVFPSDKWMAAGVFFGKLERILISKLTNQYSISTIE
DDSSKQSM
Gene ID: C; Gene Type: C2C1; Organism: 9.
Bacillus sp. NSP2.1;
Spacer Length-mode (range): 36 (35-42);
DR1:
(SEQ ID NO: 33)
GUUCGAAAGCUUAGUGGAAAGCUUCGUGGUUAGCAC;
DR2:
none;
tracrRNA1:
(SEQ ID NO: 34)
CACGGAUAAUCACGACUUUCCACUAAGCUUUCGAAUUUUAUGAUGCGAGC
AUCCUCUCAGGUCAAAAAA;
tracrRNA2:
none;
Protein Sequence:
(SEQ ID NO: 35)
MAIRSIKLKLKTHTGPEAQNLRKGIWRTHRLLNEGVAYYMKMLLLFRQES
TGERPKEELQEELICHIREQQQRNQADKNTQALPLDKALEALRQLYELLV
PSSVGQSGDAQIISRKFLSPLVDPNSEGGKGTSKAGAKPTWQKKKEANDP
TWEQDYEKWKKRREEDPTASVITTLEEYGIRPIFPLYTNTVTDIAWLPLQ
SNQFVRTWDRDMLQQAIERLLSWESWNKRVQEEYAKLKEKMAQLNEQLEG
GQEWISLLEQYEENRERELRENMTAANDKYRITKRQMKGWNELYELWSTF
PASASHEQYKEALKRVQQRLRGRFGDAHFFQYLMEEKNRLIWKGNPQRIH
YFVARNELTKRLEEAKQSATMTLPNARKHPLWVRFDARGGNLQDYYLTAE
ADKPRSRRFVTFSQLIWPSESGWMEKKDVEVELALSRQFYQQVKLLKNDK
GKQKIEFKDKGSGSTFNGHLGGAKLQLERGDLEKEEKNFEDGEIGSVYLN
VVIDFEPLQEVKNGRVQAPYGQVLQLIRRPNEFPKVTTYKSEQLVEWIKA
SPQHSAGVESLASGFRVMSIDLGLRAAAATSIFSVEESSDKNAADFSYWI
EGTPLVAVHQRSYMLRLPGEQVEKQVMEKRDERFQLHQRVKFQIRVLAQI
MRMANKQYGDRWDELDSLKQAVEQKKSPLDQTDRTFWEGIVCDLTKVLPR
NEADWEQAVVQIHRKAEEYVGKAVQAWRKRFAADERKGIAGLSMWNIEEL
EGLRKLLISWSRRTRNPQEVNRFERGHTSHQRLLTHIQNVKEDRLKQLSH
AIVMTALGYVYDERKQEWCAEYPACQVILFENLSQYRSNLDRSTKENSTL
MKWAHRSIPKYVHMQAEPYGIQIGDVRAEYSSRFYAKTGTPGIRCKKVRG
QDLQGRRFENLQKRLVNEQFLTEEQVKQLRPGDIVPDDSGELFMTLTDGS
GSKEVVFLQADINAAHNLQKRFWQRYNELFKVSCRVIVRDEEEYLVPKTK
SVQAKLGKGLFVKKSDTAWKDVYVWDSQAKLKGKTTFTEESESPEQLEDF
QEBEEAEEAKGTYRTLFRDPSGVFFPESVWYPQKDFWGEVKRKLYGKLRE
RFLTKAR
Gene ID: D; Gene Type: C2C2; Organism: 4.
Lachnospiraceae bacterium NK4A144 G619;
Spacer Length-mode (range): 35;
DR1:
(SEQ ID NO: 36)
GUUUUGAGAAUAGCCCGACAUAGAGGGCAAUAGAC;
DR2:
(SEQ ID NO: 37)
GUUAUGAAAACAGCCCGACAUAGAGGGCAAUAGACA;
tracrRNA1:
none;
tracrRNA2:
none;
Protein Sequence:
(SEQ ID NO: 38)
MKISKVDHTRMAVAKGNQHRRDEISGILYKDPTKTGSIDFDERFKKLNCS
AKILYHVFNGIAEGSNKYKNIVDKVNNNLDRVLFTGKSYDRKSIIDIDTV
LRNVEKINAFDRISTEEREQIIDDLLEIQLRKGLRKGKAGLREVLLIGAG
VIVRTDKKQEIADFLEILDEDFNKTNQAKNIKLSIENQGLVVSPVSRGEE
RIFDVSGAQKGKSSKKAQEKEALSAFLLDYADLDKNVRFEYLRKIRRLIN
LYFYVKNDDVMSLTEIPAEVNLEKDFDIWRDHEQRKEENGDFVGCPDILL
ADRDVKKSNSKQVKIAERQLRESIREKNIKRYRFSIKTIEKDDGTYFFAN
KQISVFWIHRIENAVERILGSINDKKLYRLRLGYLGEKVWKDILNFLSIK
YIAVGKAVFNFAMDDLQEKDRDIEPGKISENAVNGLTSFDYEQIKADEML
QREVAVNVAFAANNLARVTVDIPQNGEKEDILLWNKSDIKKYKKNSKKGI
LKSILQFFGGASTWNMKMFEIAYHDQPGDYEENYLYDIIQIIYSLRNKSF
HFKTYDHGDKNWNRELIGKMIEHDAERVISVEREKFHSNNLPMFYKDADL
KKILDLLYSDYAGRASQVPAFNTVLVRKNFPEFLRKDMGYKVHFNNPEVE
NQWHSAVYYLYKEIYYNLFLRDKEVKNLFYTSLKNIRSEVSDKKQKLASD
DFASRCEEIEDRSLPEICQIIMTEYNAQNFGNRKVKSQRVIEKNKDIFRH
YKMLLIKTLAGAFSLYLKQERFAFIGKATPIPYETTDVKNFLPEWKSGMY
ASFVEEIKNNLDLQEWYIVGRFLNGRMLNQLAGSLRSYIQYAEDIERRAA
ENRNKLFSKPDEKIEACKKAVRVLDLCIKISTRISAEFTDYFDSEDDYAD
YLEKYLKYQDDAIKELSGSSYAALDHFCNKDDLKFDIYVNAGQKPILQRN
IVMAKLFGPDNILSEVMEKVTESAIREYYDYLKKVSGYRVRGKCSTEKEQ
EDLLKFQRLKNAVEFRDVTEYAEVINELLGQLISWSYLRERDLLYFQLGF
HYMCLKNKSFKPAEYVDIRRNNGTIIHNAILYQIVSMYINGLDFYSCDKE
GKTLKPIETGKGVGSKIGQFIKYSQYLYNDPSYKLEIYNAGLEVFENIDE
HDNITDLRKYVDHFKYYAYGNKMSLLDLYSEFFDRFFTYDMKYQKNVVNV
LENILLRHFVIFYPKFGSGKKDVGIRDCKKERAQIEISEQSLTSEDFMFK
LDDKAGEEAKKFPARDERYLQTIAKLLYYPNEIEDMNRFMKKGETINKKV
QFNRKKKITRKQKNNSSNEVLSSTMGYLFKNIKL
Gene ID: E; Gene Type: C2C2; Organism: 8.
Listeria seeligeri serovar 1/2b str. SLCC3954;
Spacer Length-mode (range): 30;
DR1:
(SEQ ID NO: 39)
GUUUUAGUCCUCUUUCAUAUAGAGGUAGUCUCUUAC;
DR2:
none;
tracrRNA1:
(SEQ ID NO: 40)
AUGAAAAGAGGACUAAAACUGAAAGAGGACUAAAACACCAGAUGUGGAUA
ACUAUAUUAGUGGCUAUUAAAAAUUCGUCGAUAUUAGAGAGGAAACUUU;
tracrRNA2:
none;
Protein Sequence:
(SEQ ID NO: 41)
MWISIKTLIHHLGVLFFCDYMYNRREKKIIEVKTMRITKVEVDRKKVLIS
RDKNGGKLVYENEMQDNTEQIMHHKKSSFYKSVVNKTICRPEQKQMKKLV
HGLLQENSQEKIKVSDVTKLNISNFLNHRFKKSLYYFPENSPDKSEEYRI
EINLSQLLEDSLKKQQGTFICWESFSKDMELYINWAENYISSKTKLIKKS
IRNNRIQSTESRSGQLMDRYMKDILNKNKPFDIQSVSEKYQLEKLTSALK
ATFKEAKKNDKEINYKLKSTLQNHERQIIEELKENSELNQFNIEIRKHLE
TYFPIKKTNRKVGDIRNLEIGEIQKIVNHRLKNKIVQRILQEGKLASYEI
ESTVNSNSLQKIKIEEAFALKFINACLFASNNLRNMVYPVCKKDILMIGE
FKNSFKEIKHKKFIRQWSQFFSQEITVDDIELASWGLRGAIAPIRNEIIH
LKKHSWKKFFNNPTFKVKKSKIINGKTKDVTSEFLYKETLFKDYFYSELD
SVPELIINKMESSKILDYYSSQLNQVFTIPNFELSLLTSAVPFAPSFKRV
YLKGFDYQNQDEAQPDYNLKLNIYNEKAFNSEAFQAQYSLFKMVYYQVFL
PQFTTNNDLFKSSVDFILTLNKERKGYAKAFQDIRKMNKDEKPSEYMSYI
QSQLMLYQKKQEEKEKINHFEKFINQVFIKGFNSFIEKNRLTYICHPTKN
TVPENDNIEIPFHTDMDDSNIAFWLMCKLLDAKQLSELRNEMIKFSCSLQ
STEEISTFTKAREVIGLALLNGEKGCNDWKELFDDKEAWKKNMSLYVSEE
LLQSLPYTQEDGQTPVINRSIDLVKKYGTETILEKLFSSSDDYKVSAKDI
AKLHEYDVTEKIAQQESLHKQWIEKPGLARDSAWTKKYQNVINDISNYQW
AKTKVELTQVRHLHQLTIDLLSRLAGYMSIADRDFQFSSNYILERENSEY
RVTSWILLSENKNKNKYNDYELYNLKNASIKVSSKNDPQLKVDLKQLRLT
LEYLELFDNRLKEKRNNISHFNYLNGQLGNSILELFDDARDVLSYDRKLK
NAVSKSLKEILSSHGMEVTFKPLYQTNEIFILKIDKLQPKKIHHLGEKST
VSSNQVSNEYCQLVRTLLTMK
Gene ID: F; Gene Type: C2C2; Organism: 12.
Leptotrichia wadei F0279;
Spacer Length-mode (range): 31;
DR1:
(SEQ ID NO: 42)
GUUUUAGUCCCCUUCGUUUUUGGGGUAGUCUAAAUC;
DR2:
none;
tracrRNA1:
(SEQ ID NO: 43)
GAUUUAGAGCACCCCAAAAGUAAUGAAAAUUUGCAAUUAAAUAAGGAAUA
UUAAAAAAAUGUGAUUUUAAAAAAAUUGAAGAAAUUAAAUGAAAAAUUG
UCCAAGUAAAAAAA;
tracrRNA2:
(SEQ ID NO: 44)
AUUUAGAUUACCCCUUUAAUUUAUUUUACCAUAUUUUUCUCAUAAUGCAA
ACUAAUAUUCCAAAAUUUUU;
Protein Sequence:
(SEQ ID NO: 45)
MGNLFGHKRWYEVRDKKDFKIKRKVKVKRNYDGNKYILNINENNNKEKID
NNKFIRKYINYKKNDNILKEFTRKFHAGNILFKLKGKEGIIRIENNDDFL
ETEEVVLYIEAYGKSEKLKALGITKKKIIDEAIRQGITKDDKKIEIKRQE
NEEEIEIDIRDEYTNKTLNDCSIILRIIENDELETKKSIYEIFKNINMSL
YKIIEKIIENETEKVFENRYYEEHLREKLLKDDKIDVILTNFMEIREKIK
SNLEILGFVKFYLNVGGDKKKSKNKKMLVEKILNINVDLTVEDIADFVIK
ELEFWNITKRIEKVKKVNNEFLEKRRNRTYIKSYVLLDKHEKFKIERENK
KDKIVKFFVENIKNNSIKEKIEKILAEFKIDELIKKLEKELKKGNCDTEI
FGIFKKHYKVNFDSKKFSKKSDEEKELYKIIYRYLKGRIEKILVNEQKVR
LKKMEKIEIEKILNESILSEKILKRVKQYTLEHIMYLGKLRHNDIDMTTV
NTDDFSRLHAKEELDLELITFFASTNMELNKIFSRENINNDENIDFFGGD
REKNYVLDKKILNSKIKIIRDLDFIDNKNNITNNFIRKFTKIGTNERNRI
LHAISKERDLQGTQDDYNKVINIIQNLKISDEEVSKALNLDVVFKDKKNI
ITKINDIKISEENNNDIKYLPSFSKVLPEILNLYRNNPKNEPFDTIETEK
IVLNALIYVNKELYKKLILEDDLEENESKNIFLQELKKTLGNIDEIDENB
ENYYKNAQISASKGNNKAIKKYQKKVIECYIGYLRKNYEELFDFSDFKMN
IQEIKKQIKDINDNKTYERITVKTSDKTIVINDDFEYIISIFALLNSNAV
INKIRNRFFATSVWLNTSEYQNIIDILDEIMQLNTLRNECITENWNLNLE
EFIQKMKEIEKDFDDFKIQTKKEIFNNYYEDIKNNILTEFKDDINGCDVL
EKKLEKIVIFDDETKFEIDKKSNILQDEQRKLSNINKKDLKKKVDQYIKD
KDQEIKSKILCRIIFNSDFLKKYKKEIDNLIEDMESENENKFQEIYYPKE
RKNELYIYKKNLFLNIGNPNFDKIYGLISNDIKMADAKFLFNIDGKNIRK
NKISEIDAILKNLNDKLNGYSKEYKEKYIKKLKENDDFFAKNIQNKNYKS
FEKDYNRVSEYKKIRDLVEFNYLNKIESYLIDINWKLAIQMARFERDMHY
IVNGLRELGIIKLSGYNTGISRAYPKRNGSDGFYTTTAYYKFFDEESYKK
FEKICYGFGIDLSENSEINKPENESIRNYISHFYIVRNPFADYSIAEQID
RVSNLLSYSTRYNNSTYASVFEVFKKDVNLDYDELKKKFKLIGNNDILER
LMKPKKVSVLELESYNSDYIKNLIIELLTKIENTNDTL
Gene ID: G; Gene Type: C2C2; Organism: 14.
Leptotrichia shahii DSM 19757 B031;
Spacer Length-mode (range): 30 (30-32);
DR1:
(SEQ ID NO: 46)
GUUUUAGUCCCCUUCGAUAUUGGGGUGGUCUAUAUC;
DR2:
none;
tracrRNA1:
(SEQ ID NO: 47)
AUUGAUGUGGUAUACUAAAAAUGGAAAAUUGUAUUUUUGAUUAGAAAGA
UGUAAAAUUGAUUUAAUUUAAAAAUAUUUUAUUAGAUUAAAGUAGA;
tracrRNA2:
none;
Protein Sequence:
(SEQ ID NO: 48)
MSIYQEFVNKYSLSKTLRFELIPQGKTLENIKARGLILDDEKRAKDYKKA
KQIIDKYHQFFIEEILSSVCISEDLLQNYSDVYFKLKKSDDDNLQKDFKS
AKDTIKKQISEYIKDSEKFKNLFNQNLIDAKKGQESDLILWLKQSKDNGI
ELFKANSDITDIDEALEIIKSFKGWTTYFKGFHENRKNVYSSNDIPTSII
YRIVDDNLPKFLENKAKYESLKDKAPEAINYEQIKKDLAEELTFDIDYKT
SEVNQRVFSLDEVFEIANFNNYLNQSGITKFNTIIGGKFVNGENTKRKGI
NEYINLYSQQINDKTLKKYKMSVLFKQILSDTESKSFVIDKLEDDSDVVT
TMQSFYEQIAAFKTVEEKSIKETLSLLFDDLKAQKLDLSKIYFKNDKSLT
DLSQQVFDDYSVIGTAVLEYITQQIAPKNLDNPSKKEQELIAKKTEKAKY
LSLETIKLALEEFNKHRDIDKQCRFEEILANFAAIPMIFDEIAQNKDNLA
QISIKYQNQGKKDLLQASAEDDVKAIKDLLDQTNNLLHKLKIFHISQSED
KANILDKDEHFYLVFEECYFELANIVPLYNKIRNYITQKPYSDEKFKLNF
ENSTLANGWDKNKEPDNTAILFIKDDKYYLGVMNKKNNKIFDDKAIKENK
GEGYKKIVYKLLPGANKMLPKVFFSAKSIKFYNPSEDILRIRNHSTHTKN
GSPQKGYEKFEFNIEDCRKFIDFYKQSISKHPEWKDFGFRFSDTQRYNSI
DEFYREVENQGYKLTFENISESYIDSVVNQGKLYLFQIYNKDFSAYSKGR
PNLHTLYWKALFDERNLQDVVYKLNGEAELFYRKQSIPKKITHPAKEAIA
NKNKDNPKKESVFEYDLIKDKRFTEDKFFFHCPITINFKSSGANKFNDEI
NLLLKEKANDVHILSIDRGERHLAYYTLVDGKGNIIKQDTFNIIGNDRMK
TNYHDKLAAIEKDRDSARKDWKKINNIKEMKEGYLSQVVHEIAKLVIEYN
AIVVFEDLNFGFKRGRFKVEKQVYQKLEKMLIEKLNYLVFKDNEFDKTGG
VLRAYQLTAPFETFKKMGKQTGIIYYVPAGFTSKICPVTGFVNQLYPKYE
SVSKSQEFFSKFDKICYNLDKGYFEFSFDYKNFGDKAAKGKWTIASFGSR
LINFRNSDKNHNWDTREVYPTKELEKLLKDYSIEYGHGECIKAAICGESD
KKFFAKLTSVLNTILQMRNSKTGTELDYLISPVADVNGNFFDSRQAPKNM
PQDADANGAYHIGLKGLMLLGRIKNNQEGKKLNLVIKNEEYFEFVQNRNN
Gene ID: H; Gene Type: Cpf1; Organism:
Francisella ularensis subsp. novicida U112;
Spacer Length-mode (range): 31;
DR1:
(SEQ ID NO: 49)
GUCUAAGAACUUUAAAUAAUUUCUACUGUUGUAGAU;;
DR2:
none;
tracrRNA1:
(SEQ ID NO: 50)
AUCUACAAAAUUAUAAACUAAAUAAAGAUUCUUAUAAUAACUUUAUAUAU
AAUCGAAAUGUAGAGAAUUUU;
tracrRNA2:
none;
Protein Sequence:
(SEQ ID NO: 51)
MSIYQEFVNKYSLSKTLRFELIPQGKTLENIKARGLILDDEKRAKDYKKA
KQIIDKYHQFFIEEILSSVCISEDLLQNYSDVYFKLKKSDDDNLQKDFKS
AKDTIKKQISEYIKDSEKFKNLFNQNLIDAKKGQESDLILWLKQSKDNGI
ELFKANSDITDIDEALEIIKSFKGWTTYFKGFHENRKNVYSSNDIPTSII
YRIVDDNLPKFLENKAKYESLKDKAPEAINYEQIKKDLAEELTFDIDYKT
SEVNQRVFSLDEVFEIANFNNYLNQSGITKFNTIIGGKFVNGENTKRKGI
NEYINLYSQQINDKTLKKYKMSVLFKQILSDTESKSFVIDKLEDDSDVVT
TMQSFYEQIAAFKTVEEKSIKETLSLLFDDLKAQKLDLSKIYFKNDKSLT
DLSQQVFDDYSVIGTAVLEYITQQIAPKNLDNPSKKEQELIAKKTEKAKY
LSLETIKLALEEFNKHRDIDKQCRFEEILANFAAIPMIFDEIAQNKDNLA
QISIKYQNQGKKDLLQASAEDDVKAIKDLLDQTNNLLHKLKIFHISQSED
KANILDKDEHFYLVFEECYFELANIVPLYNKIRNYITQKPYSDEKFKLNF
ENSTLANGWDKNKEPDNTAILFIKDDKYYLGVMNKKNNKIFDDKAIKENK
GEGYKKIVYKLLPGANKMLPKVFFSAKSIKFYNPSEDILRIRNHSTHTKN
GSPQKGYEKFEFNIEDCRKFIDFYKQSISKHPEWKDFGFRFSDTQRYNSI
DEFYREVENQGYKLTFENISESYIDSVVNQGKLYLFQIYNKDFSAYSKGR
PNLHTLYWKALFDERNLQDVVYKLNGEAELFYRKQSIPKKITHPAKEAIA
NKNKDNPKKESVFEYDLIKDKRFTEDKFFFHCPITINFKSSGANKFNDEI
NLLLKEKANDVHILSIDRGERHLAYYTLVDGKGNIIKQDTFNIIGNDRMK
TNYHDKLAAIEKDRDSARKDWKKINNIKEMKEGYLSQVVHEIAKLVIEYN
AIVVFEDLNFGFKRGRFKVEKQVYQKLEKMLIEKLNYLVFKDNEFDKTGG
VLRAYQLTAPFETFKKMGKQTGIIYYVPAGFTSKICPVTGFVNQLYPKYE
SVSKSQEFFSKFDKICYNLDKGYFEFSFDYKNFGDKAAKGKWTIASFGSR
LINFRNSDKNHNWDTREVYPTKELEKLLKDYSIEYGHGECIKAAICGESD
KKFFAKLTSVLNTILQMRNSKTGTELDYLISPVADVNGNFFDSRQAPKNM
PQDADANGAYHIGLKGLMLLGRIKNNQEGKKLNLVIKNEEYFEFVQNRNN

[1594] Genes for Synthesis

[1595] For genes A through H, optimize for human expression and append the following DNA sequence to the end of each gene. Note this DNA sequence contains a stop codon (underlined), so do not add any stop codon to the codon optimized gene sequence:

(SEQ ID NO: 52)
AAAAGGCCGGCGGCCACGAAAAAGGCCGGCCAGGCAAAAAAGAAAAAGg
gatccTACCCATACGATGTTCCAGATTACGCTTATCCCTACGACGTGCC
TGATTATGCATACCCATATGATGTCCCCGACTATGCCTAA

[1596] For optimization, avoid the following restriction sites: BamHI, EcoRI, HindIII, BsmBI, BsaI, BbsI, AgeI, XhoI, NdeI, NotI, KpnI, BsrGI, SpeI, XbaI, NheI

[1597] Please clone these genes into a simple mammalian expression vector:

>A
(SEQ ID NO: 53)
MSLNRIYQGRVAAVETGTALAKGNVEWMPAAGGDEVLWQHHELFQ
AAINYYLVALLALADKNNPVLGPLISQMDNPQSPYHVWGSFRRQGRQRTG
LSQAVAPYITPGNNAPTLDEVFRSILAGNPTDRATLDAALMQLLKACDGA
GAIQQEGRSYWPKFCDPDSTANFAGDPAMLRREQHRLLLPQVLHDPAITH
DSPALGSFDTYSIATPDTRTPQLTGPKARARLEQAITLWRVRLPESAADF
DRLASSLKKIPDDDSRLNLQGYVGSSAKGEVQARLFALLLFRHLERSSFT
LGLLRSATPPPKNAETPPPAGVPLPAASAADPVRIARGKRSFVFRAFTSL
PCWHGGDNIHPTWKSFDIAAFKYALTVINQIEEKTKERQKECAELETDFD
YMHGRLAKIPVKYTTGEAEPPPILANDLRIPLLRELLQNIKVDTALTDGE
AVSYGLQRRTIRGFRELRRIWRGHAPAGTVFSSELKEKLAGELRQFQTDN
STTIGSVQLFNELIQNPKYWPIWQAPDVETARQWADAGFADDPLAALVQE
AELQEDIDALKAPVKLTPADPEYSRRQYDFNAVSKFGAGSRSANRHEPGQ
TERGHNTFTTEIAARNAADGNRWRATHVRIHYSAPRLLRDGLRRPDTDGN
EALEAVPWLQPMMEALAPLPTLPQDLTGMPVFLMPDVTLSGERRILLNLP
VTLEPAALVEQLGNAGRWQNQFFGSREDPFALRWPADGAVKTAKGKTHIP
WHQDRDHFTVLGVDLGTRDAGALALLNVTAQKPAKPVHRIIGEADGRTWY
ASLADARMIRLPGEDARLFVRGKLVQEPYGERGRNASLLEWEDARNIILR
LGQNPDELLGADPRRHSYPEINDKLLVALRRAQARLARLQNRSWRLRDLA
ESDKALDEIHAERAGEKPSPLPPLARDDAIKSTDEALLSQRDIIRRSFVQ
IANLILPLRGRRWEWRPHVEVPDCHILAQSDPGTDDTKRLVAGQRGISHE
RIEQIEELRRRCQSLNRALRHKPGERPVLGRPAKGEEIADPCPALLEKIN
RLRDQRVDQTAHAILAAALGVRLRAPSKDRAERRHRDIHGEYERFRAPAD
FVVIENLSRYLSSQDRARSENTRLMQWCHRQIVQKLRQLCETYGIPVLAV
PAAYSSRFSSRDGSAGFRAVHLTPDHRHRMPWSRILARLKAHEEDGKRLE
KTVLDEARAVRGLFDRLDRFNAGHVPGKPWRTLLAPLPGGPVFVPLGDAT
PMQADLNAAINIALRGIAAPDRHDIHHRLRAENKKRILSLRLGTQREKAR
WPGGAPAVTLSTPNNGASPEDSDALPERVSNLFVDIAGVANFERVTIEGV
SQKFATGRGLWASVKQRAWNRVARLNETVTDNNRNEEEDDIPM
>B
(SEQ ID NO: 54)
MATRSFILKIEPNEEVKKGLWKTHEVLNHGIAYYMNILKLIRQEAIYE
HHEQDPKNPKKVSKAEIQAELWDFVLKMQKCNSFTHEVDKDVVFNILREL
YEELVPSSVEKKGEANQLSNKFLYPLVDPNSQSGKGTASSGRKPRWYNLK
IAGDPSWEEEKKKWEEDKKKDPLAKILGKLAEYGLIPLFIPFTDSNEPIV
KEIKWMEKSRNQSVRRLDKDMFIQALERFLSWESWNLKVKEEYEKVEKEH
KTLEERIKEDIQAFKSLEQYEKERQEQLLRDTLNTNEYRLSKRGLRGWRE
IIQKWLKMDENEPSEKYLEVFKDYQRKHPREAGDYSVYEFLSKKENHFIW
RNHPEYPYLYATFCEIDKKKKDAKQQATFTLADPINHPLWVRFEERSGSN
LNKYRILTEQLHTEKLKKKLTVQLDRLIYPTESGGWEEKGKVDIVLLPSR
QFYNQIFLDIEEKGKHAFTYKDESIKFPLKGTLGGARVQFDRDHLRRYPH
KVESGNVGRIYFNMTVNIEPTESPVSKSLKIHRDDFPKFVNFKPKELTEW
IKDSKGKKLKSGIESLEIGLRVMSIDLGQRQAAAASIFEVVDQKPDIEGK
LFFPIKGTELYAVHRASFNIKLPGETLVKSREVLRKAREDNLKLMNQKLN
FLRNVLHFQQFEDITEREKRVTKWISRQENSDVPLVYQDELIQIRELMYK
PYKDWVAFLKQLHKRLEVEIGKEVKHWRKSLSDGRKGLYGISLKNIDEID
RTRKFLLRWSLRPTEPGEVRRLEPGQRFAIDQLNHLNALKEDRLKKMANT
IIMHALGYCYDVRKKKWQAKNPACQIILFEDLSNYNPYEERSRFENSKLM
KWSRREIPRQVALQGEIYGLQVGEVGAQFSSRFHAKTGSPGIRCSVVTKE
KLQDNRFFKNLQREGRLTLDKIAVLKEGDLYPDKGGEKFISLSKDRKLVT
THADINAAQNLQKRFWTRTHGFYKVYCKAYQVDGQTVYIPESKDQKQKII
EEFGEGYFILKDGVYEWGNAGKLKIKKGSSKQSSSELVDSDILKDSFDLA
SELKGEKLMLYRDPSGNVFPSDKWMAAGVFFGKLERILISKLTNQYSIST
IEDDSSKQSM
>C
(SEQ ID NO: 55)
MAIRSIKLKLKTHTGPEAQNLRKGIWRTHRLLNEGVAYYMKMLLLFR
QESTGERPKEELQEELICHIREQQQRNQADKNTQALPLDKALEALRQLYE
LLVPSSVGQSGDAQIISRKFLSPLVDPNSEGGKGTSKAGAKPTWQKKKEA
NDPTWEQDYEKWKKRREEDPTASVITTLEEYGIRPIFPLYTNTVTDIAWL
PLQSNQFVRTWDRDMLQQAIERLLSWESWNKRVQEEYAKLKEKMAQLNEQ
LEGGQEWISLLEQYEENRERELRENMTAANDKYRITKRQMKGWNELYELW
STFPASASHEQYKEALKRVQQRLRGRFGDAHFFQYLMEEKNRLIWKGNPQ
RIHYFVARNELTKRLEEAKQSATMTLPNARKHPLWVRFDARGGNLQDYYL
TAEADKPRSRRFVTFSQLIWPSESGWMEKKDVEVELALSRQFYQQVKLLK
NDKGKQKIEFKDKGSGSTFNGHLGGAKLQLERGDLEKEEKNFEDGEIGSV
YLNVVIDFEPLQEVKNGRVQAPYGQVLQLIRRPNEFPKVTTYKSEQLVEW
IKASPQHSAGVESLASGFRVMSIDLGLRAAAATSIFSVEESSDKNAADFS
YWIEGTPLVAVHQRSYMLRLPGEQVEKQVMEKRDERFQLHQRVKFQIRVL
AQIIVIRMANKQYGDRWDELDSLKQAVEQKKSPLDQTDRTFWEGIVCDLT
KVLPRNEADWEQAVVQIHRKAEEYVGKAVQAWRKRFAADERKGIAGLSMW
NIEELEGLRKLLISWSRRTRNPQEVNRFERGHTSHQRLLTHIQNVKEDRL
KQLSHAIVMTALGYVYDERKQEWCAEYPACQVILFENLSQYRSNLDRSTK
ENSTLMKWAHRSIPKYVHMQAEPYGIQIGDVRAEYSSRFYAKTGTPGIRC
KKVRGQDLQGRRFENLQKRLVNEQFLTEEQVKQLRPGDIVPDDSGELFMT
LTDGSGSKEVVFLQADINAAHNLQKRFWQRYNELFKVSCRVIVRDEEEYL
VPKTKSVQAKLGKGLFVKKSDTAWKDVYVWDSQAKLKGKTTFTEESESPE
QLEDFQEIIEEAEEAKGTYRTLFRDPSGVFFPESVWYPQKDFWGEVKRKL
YGKLRERFLTKAR
>D
(SEQ ID NO: 56)
MKISKVDHTRMAVAKGNQHRRDEISGILYKDPTKTGSIDFDERFKKLN
CSAKILYHVENGIAEGSNKYKNIVDKVNNNLDRVLFTGKSYDRKSIIDID
TVLRNVEKINAFDRISTEEREQIIDDLLEIQLRKGLRKGKAGLREVLLIG
AGVIVRTDKKQEIADFLEILDEDFNKTNQAKNIKLSIENQGLVVSPVSRG
EERIFDVSGAQKGKSSKKAQEKEALSAFLLDYADLDKNVRFEYLRKIRRL
INLYFYVKNDDVMSLTEIPAEVNLEKDFDIWRDHEQRKEENGDFVGCPDI
LLADRDVKKSNSKQVKIAERQLRESIREKNIKRYRFSIKTIEKDDGTYFF
ANKQISVFWIHRIENAVERILGSINDKKLYRLRLGYLGEKVWKDILNFLS
IKYIAVGKAVFNFAMDDLQEKDRDIEPGKISENAVNGLTSFDYEQIKADE
MLQREVAVNVAFAANNLARVTVDIPQNGEKEDILLWNKSDIKKYKKNSKK
GILKSILQFFGGASTWNMKMFEIAYHDQPGDYEENYLYDIIQIIYSLRNK
SFHFKTYDHGDKNWNRELIGKMIEHDAERVISVEREKFHSNNLPMFYKDA
DLKKILDLLYSDYAGRASQVPAENTVLVRKNEPEFLRKDMGYKVHFNNPE
VENQWHSAVYYLYKEIYYNLFLRDKEVKNLFYTSLKNIRSEVSDKKQKLA
SDDFASRCEEIEDRSLPEICQIIMTEYNAQNFGNRKVKSQRVIEKNKDIF
RHYKMLLIKTLAGAFSLYLKQERFAFIGKATPIPYETTDVKNFLPEWKSG
MYASFVEEIKNNLDLQEWYIVGRFLNGRMLNQLAGSLRSYIQYAEDIERR
AAENRNKLFSKPDEKIEACKKAVRVLDLCIKISTRISAEFTDYFDSEDDY
ADYLEKYLKYQDDAIKELSGSSYAALDHFCNKDDLKFDIYVNAGQKPILQ
RNIVMAKLFGPDNILSEVMEKVTESAIREYYDYLKKVSGYRVRGKCSTEK
EQEDLLKFQRLKNAVEFRDVTEYAEVINELLGQLISWSYLRERDLLYFQL
GFHYMCLKNKSFKPAEYVDIRRNNGTIIHNAILYQIVSMYINGLDFYSCD
KEGKTLKPIETGKGVGSKIGQFIKYSQYLYNDPSYKLEIYNAGLEVFENI
DEHDNITDLRKYVDHFKYYAYGNKMSLLDLYSEFFDRFFTYDMKYQKNVV
NVLENILLRHFVIFYPKFGSGKKDVGIRDCKKERAQIEISEQSLTSEDFM
FKLDDKAGEEAKKFPARDERYLQTIAKLLYYPNEIEDMNRFMKKGETINK
KVQFNRKKKITRKQKNNSSNEVLSSTMGYLFKNIKL
>E
(SEQ ID NO: 57)
MWISIKTLIHHLGVLFFCDYMYNRREKKIIEVKTMRITKVEVDRKKVLI
SRDKNGGKLVYENEMQDNTEQIMEIHKKSSFYKSVVNKTICRPEQKQMKK
LVHGLLQENSQEKIKVSDVTKLNISNFLNHRFKKSLYYFPENSPDKSEEY
RIEINLSQLLEDSLKKQQGTFICWESFSKDMELYINWAENYISSKTKLIK
KSIRNNRIQSTESRSGQLMDRYMKDILNKNKPFDIQSVSEKYQLEKLTSA
LKATFKEAKKNDKEINYKLKSTLQNHERQIIEELKENSELNQFNIEIRKH
LETYFPIKKTNRKVGDIRNLEIGEIQKIVNHRLKNKIVQRILQEGKLASY
EIESTVNSNSLQKIKIEEAFALKFINACLFASNNLRNMVYPVCKKDILMI
GEFKNSFKEIKHKKFIRQWSQFFSQEITVDDIELASWGLRGAIAPIRNEI
IHLKKHSWKKFFNNPTFKVKKSKIINGKTKDVTSEFLYKETLFKDYFYSE
LDSVPELIINKMESSKILDYYSSDQLNQVFTIPNFELSLLTSAVPFAPSF
KRVYLKGFDYQNQDEAQPDYNLKLNIYNEKAFNSEAFQAQYSLFKMVYYQ
VFLPQFTTNNDLFKSSVDFILTLNKERKGYAKAFQDIRKMNKDEKPSEYM
SYIQSQLMLYQKKQEEKEKINHFEKFINQVFIKGFNSFIEKNRLTYICHP
TKNTVPENDNIEIPFHTDMDDSNIAFWLMCKLLDAKQLSELRNEMIKFSC
SLQSTEEISTFTKAREVIGLALLNGEKGCNDWKELFDDKEAWKKNMSLYV
SEELLQSLPYTQEDGQTPVINRSIDLVKKYGTETILEKLFSSSDDYKVSA
KDIAKLHEYDVTEKIAQQESLHKQWIEKPGLARDSAWTKKYQNVINDISN
YQWAKTKVELTQVRHLHQLTIDLLSRLAGYMSIADRDFQFSSNYILEREN
SEYRVTSWILLSENKNKNKYNDYELYNLKNASIKVSSKNDPQLKVDLKQL
RLTLEYLELFDNRLKEKRNNISHFNYLNGQLGNSILELFDDARDVLSYDR
KLKNAVSKSLKEILSSHGMEVTFKPLYQTNHHLKIDKLQPKKIHHLGEKS
TVSSNQVSNEYCQLVRTLLTMK
>F
(SEQ ID NO: 58)
MKVTKVDGISHKKYIEEGKLVKSTSEENRTSERLSELLSIRLDIYIKNPD
NASEEENRIRRENLKKFFSNKVLHLKDSVLYLKNRKEKNAVQDKNYSEED
ISEYDLKNKNSFSVLKKILLNEDVNSEELEIFRKDVEAKLNKINSLKYSF
EENKANYQKINENNVEKVGGKSKRNIIYDYYRESAKRNDYINNVQEAFDK
LYKKEDIEKLFFLIENSKKHEKYKIREYYHKIIGRKNDKENFAKIIYEEI
QNVNNIKELIEKIPDMSELKKSQVFYKYYLDKEELNDKNIKYAFCHFVEI
EMSQLLKNYVYKRLSNISNDKIKRIFEYQNLKKLIENKLLNKLDTYVRNC
GKYNYYLQVGEIATSDFIARNRQNEAFLRNIIGVSSVAYFSLRNILETEN
ENDITGRMRGKTVKNNKGEEKYVSGEVDKIYNENKQNEVKENLKMFYSYD
FNMDNKNEIEDFFANIDEAISSIRHGIVHFNLELEGKDIFAFKNIAPSEI
SKKNIFQNEINEKKLKLKIFKQLNSANVFNYYEKDVIIKYLKNTKENFVN
KNIPFVPSFTKLYNKIEDLRNTLKFFWSVPKDKEEKDAQIYLLKNIYYGE
FLNKFVKNSKVFFKITNEVIKINKQRNQKTGHYKYQKFENIEKTVPVEYL
AIIQSREMINNQDKEEKNTYIDFIQQIFLKGFIDYLNKNNLKYIESNNNN
DNNDIFSKIKIKKDNKEKYDKILKNYEKHNRNKEIPHEINEFVREIKLGK
ILKYTENLNMFYLILKLLNHKELTNLKGSLEKYQSANKEETFSDELELIN
LLNLDNNRVTEDFELEANEIGKFLDFNENKIKDRKELKKFDTNKIYFDGE
NIIKHRAFYNIKKYGMLNLLEKIADKAKYKISLKELKEYSNKKNEIEKNY
TMQQNLHRKYARPKKDEKFNDEDYKEYEKAIGNIQKYTHLKNKVEFNELN
LLQGLLLKILHRLVGYTSIWERDLRFRLKGEFPENHYIEEIFNEDNSKNV
KYKSGQIVEKYINFYKELYKDNVEKRSIYSDKKVKKLKQEKKDLYIRNYI
AHFNYIPHAEISLLEVLENLRKLLSYDRKLKNAIMKSIVDILKEYGFVAT
FKIGADKKIEIQTLESEKIVHLKNLKKKKLMTDRNSEELCELVKVMFEYK
ALE
>G
(SEQ ID NO: 59)
MGNLFGHKRWYEVRDKKDFKIKRKVKVKRNYDGNKYILNINENNNK
EKIDNNKFIRKYINYKKNDNILKEFTRKFHAGNILFKLKGKEGIIRIENN
DDFLETEEVVLYIEAYGKSEKLKALGITKKKIIDEAIRQGITKDDKKIEI
KRQENEEEIEIDIRDEYTNKTLNDCSIILRIIENDELETKKSIYEIFKNI
NMSLYKIIEKIIENETEKVFENRYYEEHLREKLLKDDKIDVILTNFMEIR
EKIKSNLEILGFVKFYLNVGGDKKKSKNKKMLVEKILNINVDLTVEDIAD
FVIKELEFWNITKRIEKVKKVNNEFLEKRRNRTYIKSYVLLDKHEKFKIE
RENKKDKIVKFFVENIKNNSIKEKIEKILAEFKIDELIKKLEKELKKGNC
DTEIFGIFKKHYKVNFDSKKFSKKSDEEKELYKIIYRYLKGRIEKILVNE
QKVRLKKMEKIEIEKILNESILSEKILKRVKQYTLEHIMYLGKLRHNDID
MTTVNTDDFSRLHAKEELDLELITFFASTNMELNKIFSRENINNDENIDF
FGGDREKNYVLDKKILNSKIKIIRDLDFIDNKNNITNNFIRKFTKIGTNE
RNRILHAISKERDLQGTQDDYNKVINIIQNLKISDEEVSKALNLDVVFKD
KKNIITKINDIKISEENNNDIKYLPSFSKVLPEILNLYRNNPKNEPFDTI
ETEKIVLNALIYVNKELYKKLILEDDLEENESKNIFLQELKKTLGNIDEI
DENIIENYYKNAQISASKGNNKAIKKYQKKVIECYIGYLRKNYEELFDFS
DFKMNIQEIKKQIKDINDNKTYERITVKTSDKTIVINDDFEYIISIFALL
NSNAVINKIRNRFFATSVWLNTSEYQNIIDILDEIMQLNTLRNECITENW
NLNLEEFIQKMKEIEKDFDDFKIQTKKEIFNNYYEDIKNNILTEFKDDIN
GCDVLEKKLEKIVIFDDETKFEIDKKSNILQDEQRKLSNINKKDLKKKVD
QYIKDKDQEIKSKILCRIIFNSDFLKKYKKEIDNLIEDMESENENKFQEI
YYPKERKNELYIYKKNLFLNIGNPNFDKIYGLISNDIKMADAKFLFNIDG
KNIRKNKISEIDAILKNLNDKLNGYSKEYKEKYIKKLKENDDFFAKNIQN
KNYKSFEKDYNRVSEYKKIRDLVEFNYLNKIESYLIDINWKLAIQMARFE
RDMHYIVNGLRELGIIKLSGYNTGISRAYPKRNGSDGFYTTTAYYKFFDE
ESYKKFEKICYGFGIDLSENSEINKPENESIRNYISHFYIVRNPFADYSI
AEQIDRVSNLLSYSTRYNNSTYASVFEVFKKDVNLDYDELKKKFKLIGNN
DILERLMKPKKVSVLELESYNSDYIKNLIIELLTKIENTNDTL
>H
(SEQ ID NO: 60)
MSIYQEFVNKYSLSKTLRFELIPQGKTLENIKARGLILDDEKRAKDYKK
AKQIIDKYHQFFIEEILSSVCISEDLLQNYSDVYFKLKKSDDDNLQKDFK
SAKDTIKKQISEYIKDSEKFKNLFNQNLIDAKKGQESDLILWLKQSKDNG
IELFKANSDITDIDEALEIIKSFKGWTTYFKGFHENRKNVYSSNDIPTSI
IYRIVDDNLPKFLENKAKYESLKDKAPEAINYEQIKKDLAEELTFDIDYK
TSEVNQRVFSLDEVFEIANFNNYLNQSGITKFNTIIGGKFVNGENTKRKG
INEYINLYSQQINDKTLKKYKMSVLFKQILSDTESKSFVIDKLEDDSDVV
TTMQSFYEQIAAFKTVEEKSIKETLSLLFDDLKAQKLDLSKIYFKNDKSL
TDLSQQVFDDYSVIGTAVLEYITQQIAPKNLDNPSKKEQELIAKKTEKAK
YLSLETIKLALEEFNKHRDIDKQCRFEEILANFAAIPMIFDEIAQNKDNL
AQISIKYQNQGKKDLLQASAEDDVKAIKDLLDQTNNLLHKLKIFHISQSE
DKANILDKDEHFYLVFEECYFELANIVPLYNKIRNYITQKPYSDEKFKLN
FENSTLANGWDKNKEPDNTAILFIKDDKYYLGVIVINKKNNKIFDDKAIK
ENKGEGYKKIVYKLLPGANKMLPKVFFSAKSIKFYNPSEDILRIRNHSTH
TKNGSPQKGYEKFEFNIEDCRKFIDFYKQSISKHPEWKDFGFRFSDTQRY
NSIDEFYREVENQGYKLTFENISESYIDSVVNQGKLYLFQIYNKDFSAYS
KGRPNLHTLYWKALFDERNLQDVVYKLNGEAELFYRKQSIPKKITHPAKE
AIANKNKDNPKKESVFEYDLIKDKRFTEDKFFFHCPITINFKSSGANKFN
DEINLLLKEKANDVHILSIDRGERHLAYYTLVDGKGNIIKQDTFNIIGND
RMKTNYHDKLAAIEKDRDSARKDWKKINNIKEMKEGYLSQVVHEIAKLVI
EYNAIVVFEDLNFGFKRGRFKVEKQVYQKLEKMLIEKLNYLVFKDNEFDK
TGGVLRAYQLTAPFETFKKMGKQTGIIYYVPAGFTSKICPVTGFVNQLYP
KYESVSKSQEFFSKFDKICYNLDKGYFEFSFDYKNFGDKAAKGKWTIASF
GSRLINFRNSDKNHNWDTREVYPTKELEKLLKDYSIEYGHGECIKAAICG
ESDKKFFAKLTSVLNTILQMRNSKTGTELDYLISPVADVNGNFFDSRQAP
KNMPQDADANGAYHIGLKGLMLLGRIKNNQEGKKLNLVIKNEEYFEFVQN
RNN

[1598] For A-locus through G-locus, please clone and insert into a low-copy plasmid. Please use a vector that does not contain Amp resistance.

>A-locus
(SEQ ID NO: 61)
TATCCGGTCGAATCGAGAATGACGACCGCTACGTCTTGGACTACGA
AGCCGTGGCCCTTGCCGATGCTCTCGGTGTGGATGTTGCCGACCTGTTC
CGCAAGATCGATTGCCCCAAGAACCTGCTGCGCAGGCGGGCAGGGTAGG
GGAGCGGTTTCCGGCGGAGATTTTCGGAGGCGCCGGTAACGTTATGTCG
GGGAATTTGCTATACATCGACGATAATTAGTTTTGTTGATTCAGGATCG
AAATGCGCTCAAACAAAGAACGTTCCGCGTTTCCCTCATGCGCTACTAC
GCCCACACCGCCATCTTTCGGCACGCAAACAAAGCAGATGGGTTGCCTG
TCAATGGGTGATCATTGCCTGAAGTTACCATCCATCAATAATATAAATC
ATCCTTACTCCGAATGTCCCTCAATCGCATCTATCAAGGCCGCGTGGCG
GCCGTCGAAACAGGAACGGCCTTAGCGAAAGGTAATGTCGAATGGATGC
CTGCCGCAGGAGGCGACGAAGTTCTCTGGCAGCACCACGAACTTTTCCA
AGCTGCCATCAACTACTATCTCGTCGCCCTGCTCGCACTCGCCGACAAA
AACAATCCCGTACTTGGCCCGCTGATCAGCCAGATGGATAATCCCCAAA
GCCCTTACCATGTCTGGGGAAGTTTCCGCCGCCAAGGACGTCAGCGCAC
AGGTCTCAGTCAAGCCGTTGCACCTTATATCACGCCGGGCAATAACGCT
CCCACCCTTGACGAAGTTTTCCGCTCCATTCTTGCGGGCAACCCAACCG
ACCGCGCAACTTTGGACGCTGCACTCATGCAATTGCTCAAGGCTTGTGA
CGGCGCGGGCGCTATCCAGCAGGAAGGTCGTTCCTACTGGCCCAAATTC
TGCGATCCTGACTCCACTGCCAACTTCGCGGGAGATCCGGCCATGCTCC
GGCGTGAACAACACCGCCTCCTCCTTCCGCAAGTTCTCCACGATCCGGC
GATTACTCACGACAGTCCTGCCCTTGGCTCGTTCGACACTTATTCGATT
GCTACCCCCGACACCAGAACTCCTCAACTCACCGGCCCCAAGGCACGCG
CCCGTCTTGAGCAGGCGATCACCCTCTGGCGCGTCCGTCTTCCCGAATC
GGCTGCTGACTTCGATCGCCTGCCAGTTCCCTCAAAAAAATTCCGGACG
ACGATTCTCGCCTTAACCTTCAGGGCTACGTCGGCAGCAGTGCGAAAGG
CGAAGTTCAGGCCCGTCTTTTCGCCCTTCTGCTATTCCGTCACCTGGAG
CGTTCCTCCTTTACGCTTGGCCTTCTCCGTTCCGCCACCCCGCCGCCCA
AGAACGCTGAAACACCTCCTCCCGCCGGCGTTCCTTTACCTGCGGCGTC
CGCAGCCGATCCGGTGCGGATAGCCCGTGGCAAACGCAGTTTTGTTTTT
CGCGCATTCACCAGTCTCCCCTGCTGGCATGGCGGTGATAACATCCATC
CCACCTGGAAGTCATTCGACATCGCAGCGTTCAAATATGCCCTCACGGT
CATCAACCAGATCGAGGAAAAGACGAAAGAACGCCAAAAAGAATGTGCG
GAACTTGAAACTGATTTCGACTACATGCACGGACGGCTCGCCAAGATTC
CGGTAAAATACACGACCGGCGAAGCCGAACCGCCCCCCATTCTCGCAAA
CGATCTCCGCATCCCCCTCCTCCGCGAACTTCTCCAGAATATCAAGGTC
GACACCGCACTCACCGATGGCGAAGCCGTCTCCTATGGTCTCCAACGCC
GCACCATTCGCGGTTTCCGCGAGCTGCGCCGCATCTGGCGCGGCCATGC
CCCCGCTGGCACGGTCTTTTCCAGCGAGTTGAAAGAAAAACTAGCCGGC
GAACTCCGCCAGTTCCAGACCGACAACTCCACCACCATCGGCAGCGTCC
AACTCTTCAACGAACTCATCCAAAACCCGAAATACTGGCCCATCTGGCA
GGCTCCTGACGTCGAAACCGCCCGCCAATGGGCCGATGCCGGTTTTGCC
GACGATCCGCTCGCCGCCCTTGTGCAAGAAGCCGAACTCCAGGAAGACA
TCGACGCCCTCAAGGCTCCAGTCAAACTCACTCCGGCCGATCCTGAGTA
TTCAAGAAGGCAATACGATTTCAATGCCGTCAGCAAATTCGGGGCCGGC
TCCCGCTCCGCCAATCGCCACGAACCCGGGCAGACGGAGCGCGGCCACA
ACACCTTTACCACCGAAATCGCCGCCCGTAACGCGGCGGACGGGAACCG
CTGGCGGGCAACCCACGTCCGCATCCATTACTCCGCTCCCCGCCTTCTT
CGTGACGGACTCCGCCGACCTGACACCGACGGCAACGAAGCCCTGGAAG
CCGTCCCTTGGCTCCAGCCCATGATGGAAGCCCTCGCCCCTCTCCCGAC
GCTTCCGCAAGACCTCACAGGCATGCCGGTCTTCCTCATGCCCGACGTC
ACCCTTTCCGGTGAGCGTCGCATCCTCCTCAATCTTCCTGTCACCCTCG
AACCAGCCGCTCTTGTCGAACAACTGGGCAACGCCGGTCGCTGGCAAAA
CCAGTTCTTCGGCTCCCGCGAAGATCCATTCGCTCTCCGATGGCCCGCC
GACGGTGCTGTAAAAACCGCCAAGGGGAAAACCCACATACCTTGGCACC
AGGACCGCGATCACTTCACCGTACTCGGCGTGGATCTCGGCACGCGCGA
TGCCGGGGCGCTCGCTCTTCTCAACGTCACTGCGCAAAAACCGGCCAAG
CCGGTCCACCGCATCATTGGTGAGGCCGACGGACGCACCTGGTATGCCA
GCCTTGCCGACGCTCGCATGATCCGCCTGCCCGGGGAGGATGCCCGGCT
CTTTGTCCGGGGAAAACTCGTTCAGGAACCCTATGGTGAACGCGGGCGA
AACGCGTCTCTTCTCGAATGGGAAGACGCCCGCAATATCATCCTTCGCC
TTGGCCAAAATCCCGACGAACTCCTCGGCGCCGATCCCCGGCGCCATTC
GTATCCGGAAATAAACGATAAACTTCTCGTCGCCCTTCGCCGCGCTCAG
GCCCGTCTTGCCCGTCTCCAGAACCGGAGCTGGCGGTTGCGCGACCTTG
CAGAATCGGACAAGGCCCTTGATGAAATCCATGCCGAGCGTGCCGGGGA
GAAGCCTTCTCCGCTTCCGCCCTTGGCTCGCGACGATGCCATCAAAAGC
ACCGACGAAGCCCTCCTTTCCCAGCGTGACATCATCCGGCGATCCTTCG
TTCAGATCGCCAACTTGATCCTTCCCCTTCGCGGACGCCGATGGGAATG
GCGGCCCCATGTCGAGGTCCCGGATTGCCACATCCTTGCGCAGAGCGAT
CCCGGTACGGATGACACCAAGCGTCTTGTCGCCGGACAACGCGGCATCT
CTCACGAGCGTATCGAGCAAATCGAAGAACTCCGTCGTCGCTGCCAATC
CCTCAACCGTGCCCTGCGTCACAAACCCGGAGAGCGTCCCGTGCTCGGA
CGCCCCGCCAAGGGCGAGGAAATCGCCGATCCCTGTCCCGCGCTCCTCG
AAAAGATCAACCGTCTCCGGGACCAGCGCGTTGACCAAACCGCGCATGC
CATCCTCGCCGCCGCTCTCGGTGTTCGACTCCGCGCCCCCTCAAAAGAC
CGCGCCGAACGCCGCCATCGCGACATCCATGGCGAATACGAACGCTTTC
GTGCGCCCGCTGATTTTGTCGTCATCGAAAACCTCTCCCGTTATCTCAG
CTCGCAGGATCGTGCTCGTAGTGAAAACACCCGTCTCATGCAGTGGTGC
CATCGCCAGATCGTGCAAAAACTCCGTCAGCTCTGCGAGACCTACGGCA
TCCCCGTCCTCGCCGTCCCGGCGGCCTACTCATCGCGTTTTTCTTCCCG
GGACGGCTCGGCCGGATTCCGGGCCGTCCATCTGACACCGGACCACCGT
CACCGGATGCCATGGAGCCGCATCCTCGCCCGCCTCAAGGCCCACGAGG
AAGACGGAAAAAGACTCGAAAAGACGGTGCTCGACGAGGCTCGCGCCGT
CCGGGGACTCTTTGACCGGCTCGACCGGTTCAACGCCGGGCATGTCCCG
GGAAAACCTTGGCGCACGCTCCTCGCGCCGCTCCCCGGCGGCCCTGTGT
TTGTCCCCCTCGGGGACGCCACACCCATGCAGGCCGATCTGAACGCCGC
CATCAACATCGCCCTCCGGGGCATCGCGGCTCCCGACCGCCACGACATC
CATCACCGGCTCCGTGCCGAAAACAAAAAACGCATCCTGAGCTTGCGTC
TCGGCACTCAGCGCGAGAAAGCCCGCTGGCCTGGAGGAGCTCCGGCGGT
GACACTCTCCACTCCGAACAACGGCGCCTCTCCCGAAGATTCCGATGCG
TTGCCCGAACGGGTATCCAACCTGTTTGTGGACATCGCCGGTGTCGCCA
ACTTCGAGCGAGTCACGATCGAAGGAGTCTCGCAAAAATTCGCCACCGG
GCGTGGCCTTTGGGCCTCCGTCAAGCAACGTGCATGGAACCGCGTTGCC
AGACTCAACGAGACAGTAACAGATAACAACAGGAACGAAGAGGAGGACG
ACATTCCGATGTAACCATTGCTTCATTACATCTGAGTCTCCCCTCAATC
CCTCTGCCCCATGCGTGATATAACCTCCACCTCATGTCCCGGATCGGCG
CCGGCAACCTGTAGTTCCCTTCCATCCTCCAACACTCCCGCAGATCGCG
ATCCGCTGCCGCCGATGCCGGTGCGCCGCCTTCACAACTATCTCTACTG
TCCGCGGCTTTTTTATCTCCAGTGGGTCGAGAATCTCTTTGAGGAAAAT
GCCGACACCATTGCCGGCAGCGCCGTGCATCGTCACGCCGACAAACCTA
CGCGTTACGATGATGAAAAAGCCGAGGCACTTCGCACTGGTCTCCCTGA
AGGCGCGCACATACGCAGCCTTCGCCTGGAAAACGCCCAACTCGGTCTC
GTTGGCGTGGTGGATATCGTGGAGGGAGGCCCCGACGGACTCGAACTCG
TCGACTACAAAAAAGGTTCCGCCTTCCGCCTCGACGACGGCACGCTCGC
TCCCAAGGAAAACGACACCGTGCAACTTGCCGCCTACGCTCTTCTCCTG
GCTGCCGATGGTGCGCGCGTTGCGCCCATGGCGACGGTCTATTACGCTG
CCGATCGCCGGCGTGTCACCTTCCCGCTCGATGACGCCCTCTACGCCCG
CACCCGTTCCGCCCTCGAAGAGGCCCGCGCCGTTGCAACCTCGGGGCGC
ATACCTCCGCCGCTCGTCTCTGACGTCCGCTGCCTCCATTGTTCCTCCT
ATGCGCTTTGCCTTCCCCGCGAGTCCGCCTGGTGGTGCCGCCATCGCAG
CACGCCGCGGGGAGCCGGCCACACCCCCATGTTGCCGGGCTTTGAGGAT
GACGCCGCCGCCATTCACCAAATCTCCGAACCTGACACCGAGCCACCAC
CCGATCTTGCCAGCCAGCCTCCCCGTCCCCCGCGGCTCGATGGAGAATT
GTTGGTTGTCCAGACTCCGGGAGCGATGATCGGACAAAGCGGCGGTGAG
TTTACCGTGTCCGTCAAGGGTGAGGTTTTGCGCAAGCTTCCGGTTCATC
AACTCCGGGCCATTTACGTTTACGGAGCCGTGCAACTCACGGCGCATGC
TGTGCAGACCGCCCTTGAGGAGGATATCGACGTCTCCTATTTTGCGCCC
AGCGGCCGCTTTCTTGGCCTCCTCCGCGGCCTGCCCGCATCCGGCGTGG
ATGCGCGTCTCGGGCAATACACCCTGTTTCGCGAACCCTTTGGCCGTCT
CCGTCTCGCCTGCGAGGCGATTCGGGCCAAGATCCATAACCAGCGCGTC
CTCCTCATGCGTAACGGCGAGCCCGGGGAGGGCGTCTTGCGCGAACTCG
CCCGTCTGCGCGACGCCACCAGTGAGGCGACTTCGCTCGACGAACTCCT
CGGCATCGAGGGCATCGCCGCGCATTTCTATTTCCAGTATTTTCCCACC
ATGCTGAAAGAACGGGCGGCCTGGGCCTTTGATTTTTCCGGACGCAATC
GCCGCCCGCCGCGCGACCCGGTCAACGCCCTGCTTTCGTTCGGTTACAG
CGTGTTGTCCAAGGAACTTGCCGGCGTCTGCCACGCTGTTGGCCTAGAC
CCGTTTTTCGGCTTCATGCACCAGCCGCGTTACGGGCGCCCCGCACTCG
CTCTCGATCTGATGGAGGAGTTTCGCCCTCTCATCGCCGACAGTGTTGC
CCTGAATCTCATCAACCGTGGCGAACTCGACGAAGGGGACTTTATCCGG
TCGGCCAATGGCACCGCGCTCAATGATCGGGGCCGCCGGCGTTTTTGGG
AGGCATGGTTCCGGCGTCTCGACAGCGAAGTCAGCCATCCTGAATTTGG
TTACAAGATGAGCTATCGACGGATGCTTGAAGTGCAGGCGCGCCAGCTA
TGGCGCTATGTGCGCGGTGACGCCTTCCGCTACCACGGATTCACCACCC
GTTGATTCCGATGTCAGATCCCCGCCGCCGTTATCTTGTGTGTTACGAC
ATCGCCAATCCGAAGCGATTGCGCCAAGTGGCCAAGCTGCTGGAGAGCT
ATGGCACGCGTCTGCAATACTCGGTTTTCGAATGTCCTTTGGACGATCT
TCGTCTTGAACAGGCGAAGGCTGATTTGCGCGACACGATTAATGCCGAC
CAAGACCAGGTGTTATTTGTTTCGCTTGGCCCCGAAGCCAACGATGCCA
CGTTGATCATCGCCACGCTTGGGCTCCCTTATACCGTGCGCTCGCGAGT
GACGATTATCTGACCCATAACCCACGTGTTGAAGAGGCTGAAAACAGAC
GGACCTCTATGAAGAACAATTGACGTTTTGGCCGAACTCAGCAGACCTT
TATGCGGCTAAGGCCAATGATCATCCATCCTACCGCCATTGGGCTGGAG
ACGTTTTTTGAAACGGCGAGTGCTGCGGATAGCGAGTTTCTCTTGGGGA
GGCGCTCGCGGCCACTTTTACAGAGGAGATGTTCGGGCGAACTGGCCGA
CCTAACAAGGCGTACCCGGCTCAAAATCGAGGCACGCTCGCACGGGATG
ATGTAATTCGTTGTTTTTCAGCATACCGTGCGAGCACGGGCCGCAGCGA
ATGCCGTTTCACGAATCGTCAGGCGGCGGGGAGAAGTCATTTAATAAGG
CCACTGTTAAAAGCCGCAGCGAATGCCGTTTCACGAATCGTCAGGCGGG
CAGTGGATGTTTTTCCATGAGGCGAAGAATTTCATCGCCGCAGTGAATG
CCGTTTCACCATTGATGAAGAATGCGAGGTGAAAACAGAGAAATTGGGT
CAACTCTATCACTCTTATTCAGCCATCGTTTCAAGAAAGGATACCTCGT
ATTGGATACAACACAGCTCGTTCGTTCTCTCTACCTCCCTCGACAATCT
CAAGGA
>B-locus
(SEQ ID NO: 62)
TAATAAAATTGAAATATCACTATGGATTATTGTAATATTACCATAA
AGATAGGTGACGTTTTTTTGAAAATTGTAAACCTAATTTGAAGAAAACC
AATTAAAAATCGCTTCGGCTTTTTTTTAAGTGCCAGGTAGCATTGATGC
TAACCCATGTGTAATAAAGGTTTGTTTTCCTTCGGGGCACGAACACATT
ATAAGGGAAACCTAAAGATTCCCTTTCTTGTTTAATATTATAACCAGTG
AAAATAAGAATAATGCACCTAAAACTAATATACAGAAAATAAGAATTAA
AAGTACTAATATATACATCATATGTTATCCTCCAATGCTTTATTTTTTA
ATAATTGATGTTAGTATTAGTTTTATTTTAATTTCTAAACATAAGAATT
TGAAAAGGATGTGTTTATTATGGCGACACGCAGTTTTATTTTAAAAATT
GAACCAAATGAAGAAGTTAAAAAGGGATTATGGAAGACGCATGAGGTAT
TGAATCATGGAATTGCCTACTACATGAATATTCTGAAACTAATTAGACA
GGAAGCTATTTATGAACATCATGAACAAGATCCTAAAAATCCGAAAAAA
GTTTCAAAAGCAGAAATACAAGCCGAGTTATGGGATTTTGTTTTAAAAA
TGCAAAAATGTAATAGTTTTACACATGAAGTTGACAAAGATGTTGTTTT
TAACATCCTGCGTGAACTATATGAAGAGTTGGTCCCTAGTTCAGTCGAG
AAAAAGGGTGAAGCCAATCAATTATCGAATAAGTTTCTGTACCCGCTAG
TTGATCCGAACAGTCAAAGTGGGAAAGGGACGGCATCATCCGGACGTAA
ACCTCGGTGGTATAATTTAAAAATAGCAGGCGACCCATCGTGGGAGGAA
GAAAAGAAAAAATGGGAAGAGGATAAAAAGAAAGATCCCCTTGCTAAAA
TCTTAGGTAAGTTAGCAGAATATGGGCTTATTCCGCTATTTATTCCATT
TACTGACAGCAACGAACCAATTGTAAAAGAAATTAAATGGATGGAAAAA
AGTCGTAATCAAAGTGTCCGGCGACTTGATAAGGATATGTTTATCCAAG
CATTAGAGCGTTTTCTTTCATGGGAAAGCTGGAACCTTAAAGTAAAGGA
AGAGTATGAAAAAGTTGAAAAGGAACACAAAACACTAGAGGAAAGGATA
AAAGAGGACATTCAAGCATTTAAATCCCTTGAACAATATGAAAAAGAAC
GGCAGGAGCAACTTCTTAGAGATACATTGAATACAAATGAATACCGATT
AAGCAAAAGAGGATTACGTGGTTGGCGTGAAATTATCCAAAAATGGCTA
AAGATGGATGAAAATGAACCATCAGAAAAATATTTAGAAGTATTTAAAG
ATTATCAACGGAAACATCCACGAGAAGCCGGGGACTATTCTGTCTATGA
ATTTTTAAGCAAGAAAGAAAATCATTTTATTTGGCGAAATCATCCTGAA
TATCCTTATTTGTATGCTACATTTTGTGAAATTGACAAAAAAAAGAAAG
ACGCTAAGCAACAGGCAACTTTTACTTTGGCTGACCCGATTAACCATCC
GTTATGGGTACGATTTGAAGAAAGAAGCGGTTCGAACTTAAACAAATAT
CGAATTTTAACAGAGCAATTACACACTGAAAAGTTAAAAAAGAAATTAA
CAGTTCAACTTGATCGTTTAATTTATCCAACTGAATCCGGCGGTTGGGA
GGAAAAAGGTAAAGTAGATATCGTTTTGTTGCCGTCAAGACAATTTTAT
AATCAAATCTTCCTTGATATAGAAGAAAAGGGGAAACATGCTTTTACTT
ATAAGGATGAAAGTATTAAATTCCCCCTTAAAGGTACACTTGGTGGTGC
AAGAGTGCAGTTTGACCGTGACCATTTGCGGAGATATCCGCATAAAGTA
GAATCAGGAAATGTTGGACGGATTTATTTTAACATGACAGTAAATATTG
AACCAACTGAGAGCCCTGTTAGTAAGTCTTTGAAAATACATAGGGACGA
TTTCCCCAAGTTCGTTAATTTTAAACCGAAAGAGCTCACCGAATGGATA
AAAGATAGTAAAGGGAAAAAATTAAAAAGTGGTATAGAATCCCTTGAAA
TTGGTCTACGGGTGATGAGTATCGACTTAGGTCAACGTCAAGCGGCTGC
TGCATCGATTTTTGAAGTAGTTGATCAGAAACCGGATATTGAAGGGAAG
TTATTTTTTCCAATCAAAGGAACTGAGCTTTATGCTGTTCACCGGGCAA
GTTTTAACATTAAATTACCGGGTGAAACATTAGTAAAATCACGGGAAGT
ATTGCGGAAAGCTCGGGAGGACAACTTAAAATTAATGAATCAAAAGTTA
AACTTTCTAAGAAATGTTCTACATTTCCAACAGTTTGAAGATATCACAG
AAAGAGAGAAGCGTGTAACTAAATGGATTTCTAGACAAGAAAATAGTGA
TGTTCCTCTTGTATATCAAGATGAGCTAATTCAAATTCGTGAATTAATG
TATAAACCCTATAAAGATTGGGTTGCCTTTTTAAAACAACTCCATAAAC
GGCTAGAAGTCGAGATTGGCAAAGAGGTTAAGCATTGGCGAAAATCATT
AAGTGACGGGAGAAAAGGTCTTTACGGAATCTCCCTAAAAAATATTGAT
GAAATTGATCGAACAAGGAAATTCCTTTTAAGATGGAGCTTACGTCCAA
CAGAACCTGGGGAAGTAAGACGCTTGGAACCAGGACAGCGTTTTGCGAT
TGATCAATTAAACCACCTAAATGCATTAAAAGAAGATCGATTAAAAAAG
ATGGCAAATACGATTATCATGCATGCCTTAGGTTACTGTTATGATGTAA
GAAAGAAAAAGTGGCAGGCAAAAAATCCAGCATGTCAAATTATTTTATT
TGAAGATTTATCTAACTACAATCCTTACGAGGAAAGGTCCCGTTTTGAA
AACTCAAAACTGATGAAGTGGTCACGGAGAGAAATTCCACGACAAGTCG
CCTTACAAGGTGAAATTTACGGATTACAAGTTGGGGAAGTAGGTGCCCA
ATTCAGTTCAAGATTCCATGCGAAAACCGGGTCGCCGGGAATTCGTTGC
AGTGTTGTAACGAAAGAAAAATTGCAGGATAATCGCTTTTTTAAAAATT
TACAAAGAGAAGGACGACTTACTCTTGATAAAATCGCAGTTTTAAAAGA
AGGAGACTTATATCCAGATAAAGGTGGAGAAAAGTTTATTTCTTTATCA
AAGGATCGAAAGTTGGTAACTACGCATGCTGATATTAACGCGGCCCAAA
ATTTACAGAAGCGTTTTTGGACAAGAACACATGGATTTTATAAAGTTTA
CTGCAAAGCCTATCAGGTTGATGGACAAACTGTTTATATTCCGGAGAGC
AAGGACCAAAAACAAAAAATAATTGAAGAATTTGGGGAAGGCTATTTTA
TTTTAAAAGATGGTGTATATGAATGGGGTAATGCGGGGAAACTAAAAAT
TAAAAAAGGTTCCTCTAAACAATCATCGAGTGAATTAGTAGATTCGGAC
ATACTGAAAGATTCATTTGATTTAGCAAGTGAACTTAAGGGAGAGAAAC
TCATGTTATATCGAGATCCGAGTGGAAACGTATTTCCTTCCGACAAGTG
GATGGCAGCAGGAGTATTTTTTGGCAAATTAGAAAGAATATTGATTTCT
AAGTTAACAAATCAATACTCAATATCAACAATAGAAGATGATTCTTCAA
AACAATCAATGTAAAAGTTTGCCCGTATAAGAACTTAATTAATTAGGAT
GGTAGGATGTTACTAAATATGTCTGTAGGCATCATTCCTACTATCCGTT
TTGTCCGAATATCAGAGCATTAGGTGAGGAATGGTAAGAAAGGAAAATT
TATATGAACCAACCGATTCCTATTCGAATGTTAAATGAAATACAATATT
GTGAGCGACTTTTTTACTTTATGCATGTCCAAAAGCTATTTGATGAGAA
TGCAGATACAGTTGAAGGAAGTGCACAGCATGAGCGGGCAGAAAGAAGC
AAAAGACCAAGTAAAATGGGACCAAAGGAATTATGGGGTGAGGCGCCAA
GAAGTCTTAAGCTTGGTGATGAGCTGTTAAATATTACCGGTGTTCTTGA
TGCCATAAGTCATGAAGAGAACAGTTGGATCCCGGTTGAATCAAAACAC
AGTTCCGCACCGGATGGATTGAACCCTTTTAAAGTAGATGGCTTTCTAC
TTGACGGGTCTGCATGGCCAAACGATCAAATTCAACTTTGTGCACAAGG
CTTGCTCTTGAATGCCAATGGATACCCGTGTGATTATGGGTATTTATTT
TATCGTGGTAATAAGAAAAAGGTGAAAATTTATTTTACTGAAGATTTAA
TCGCTGCCACAAAGTACTATATTAAAAAAGCACACGAGATACTAGTATT
ATCTGGTGATGAATCAGCTATTCCTAAGCCTTTAATTGATTCTAATAAG
TGTTTTCGCTGTTCTTTAAACTATATCTGTCTTCCGGATGAAACGAACT
ATCTATTAGGGGCAAGTTCAACAATTCGTAAAATTGTGCCTTCAAGGAC
AGATGGTGGCGTTTTATATGTATCAGAGTCTGGTACAAAATTAGGAAAA
TCGGGTGAGGAGTTAATCATTCAGTATAAAGATGGCCAAAAGCAGGGTG
TTCCTATAAAAGATATTATTCAAGTTTCGTTAATTGGAAATGTTCAATG
CTCAACGCAATTACTTCATTTTTTAATGCAATCAAATATTCCTGTAAGT
TATTTATCATCCCACGGTCGTTTGATTGGTGTCAGTTCATCTTTAGTTA
CAAAAAATGTTTTAACAAGGCAGCAACAGTTCATTAAATTTACAAATCC
TGAGTTTGGACTAAATCTAGCAAAACAAATTGTTTATGCCAAGATTCGA
AATCAACGAACTTTACTTAGAAGAAATGGGGGGAGTGAGGTAAAGGAGA
TTTTAACAGATTTAAAATCTTTAAGTGACAGTGCACTGAACGCAATATC
AATAGAACAATTACGGGGTATTGAAGGGATTTCTGCAAAACATTATTTC
GCAGGATTTCCGTTTATGTTGAAAAATGAATTACGTGAATTGAATTTAA
TGAAAGGGCGTAATAGGAGACCGCCAAAAGATCCTGTAAATGTACTTCT
TTCTCTTGGTTATACTTTATTGACACGTGATATTCATGCTGCGTGTGGT
TCAGTCGGATTGGATCCGATGTTTGGTTGTTACCATCGTCCAGAAGCAG
GTCGACCGGCTCTAGTATTAGATGTTATGGAAACATTTCGACCACTTAT
TGTAGACAGTATTGTCATCCGAGCTTTGAATACGGGTGAAATCTCATTA
AAAGATTTTTATATAGGAAAAGATAGTTGTCAATTATTAAAACATGGCC
GCGATTCCTTTTTTGCCATTTATGAAAGAAGAATGCATGAAACTATTAC
CGATCCAATTTTCGGCTATAAGATTAGCTATCGCCGTATGCTCGATTTG
CACATTCGAATGCTTGCAAGGTTTATTGAAGGGGAACTGCCGGAATATA
AACCATTAATGACCCGGTGAGTTTGTTTATTAGGTTAAAAGAAGGTGAA
GACATGCAGCAATACGTCCTTGTTTCTTATGATATTTCGGACCAAAAAA
GATGGAGAAAAGTATTTAAACTGATGAAAGGATACGGAGAACATGTTCA
ATATTCCGTATTCATATGCCAGTTAACTGAATTACAGAAGGCAAAATTA
CAAGCCTCTTTAGAAGACATTATCCATCATAAGAATGACCAAGTAATGT
TTGTTCACATCGGGCCAGTGAAAGATGGTCAACTATCTAAAAAAATCTC
AACAATTGGGAAAGAATTTGTTCCATTGGATTTAAAGCGGCTTATATTT
TGAAAAGATATAGCAAAGAAATCTTATGAAAAAAATACAAAAATATATT
GTTAAAAAATAGGGAATATTATATAATGGACTTACGAGGTTCTGTCTTT
TGGTCAGGACAACCGTCTAGCTATAAGTGCTGCAGGGGTGTGAGAAACT
CCTATTGCTGGACGATGTCTCTTTTATTTCTTTTTTCTTGGATCTGAGT
ACGAGCACCCACATTGGACATTTCGCATGGTGGGTGCTCGTACTATAGG
TAAAACAAACCTTTTTAAGAAGAATACAAAAATAACCACAATATTTTTT
AAAAGGAATTTTGATGGATTTACATAACCTCTCGCAACATGCTTCTAAA
ACCCAAGCCCACCATAGCCCAAAACCCCCTGCGGTCCAAGAAAAAAGAA
ATGATACGAGGCATTAGCACCGGGGAGAAGTCATTTAATAAGGCCACTG
TTAAAAGTCCAAGAAAAAAGAAATGATACGAGGCATTAGCACAACAATA
TAAACGACTACTTTACCGTGTTCAAGAAAAAAGAAATGATATGAGGCAT
TAGCACGATGGGATGGGAGAGAGAGGACAGTTCTACTCTTGCTGTATCC
AGCTTCTTTTACTTTATCCGGTATCATTTCTTCACTTCTTTCTGCACAT
AAAAAAGCACCTAACTATTTGGATAAGTTAAGTGCTTTTATTTCCGTTT
GAAGTTGTCTATTGCTTTTTTCTTCATATCTTCAAATTTTTTCTGTTTC
TCAGAGTCAACTTTACCAACTGTAATCCCTTTTCTTTTTGGCATTGGGG
TATCTTTCCACCTTAGTGTGTTCATAAGGCTTATATTTATCACTCATTG
TATTCCTCCAACACAATTATAATTTTTCCGTCATCCTCAATCCAACCGT
CAACTGTGACAAAAGACGAATCTCTCTTAT
>C-locus
(SEQ ID NO: 63)
GTTTCATTTGGAAAGGGAGAGCATTGGCTTTTCTCTTTGTAAATAAAGT
GCAAGCTTTGTAATAAGCTTCTAGTGGAGAAGTGATTGTTTGAATCACC
CAATGCACACGCACTAAAGTTAGACGAACCTATAATTCGTATTAGTAAG
TATAGTACATGAAGAAAAATGCAACAAGCATTTACTCTCTTTTAAATAA
AGAATTGATAGCTGTTAATATTGATAGTATATTATACCTTATAGATGTT
CGATTTTTTTTGAAATTCAAAAATCATACTTAGTAAAGAAAGGAAATAA
CGTCATGGACAAGCGAAAGCGTAGAAGTTACGAGTTTAGGTGGGAAGCG
GGAGGCACCAGTCATGGCAATCCGTAGCATAAAACTAAAACTAAAAACC
CACACAGGCCCGGAAGCGCAAAACCTCCGAAAAGGAATATGGCGGACGC
ATCGGTTGTTAAATGAAGGCGTCGCCTATTACATGAAAATGCTCCTGCT
CTTTCGTCAGGAAAGCACTGGTGAACGGCCAAAAGAAGAACTACAGGAA
GAACTGATTTGTCACATACGCGAACAGCAACAACGAAATCAGGCAGATA
AAAATACGCAAGCGCTTCCGCTAGATAAGGCACTGGAAGCTTTGCGCCA
ACTATATGAACTGCTTGTCCCCTCCTCGGTCGGACAAAGTGGCGACGCC
CAGATCATCAGCCGAAAGTTTCTCAGCCCGCTCGTCGATCCGAACAGCG
AAGGCGGCAAAGGTACTTCGAAGGCAGGGGCAAAACCCACTTGGCAGAA
GAAAAAAGAAGCGAACGACCCAACCTGGGAACAGGATTACGAAAAATGG
AAAAAAAGACGCGAGGAAGACCCAACCGCTTCTGTGATTACTACTTTGG
AGGAATACGGCATTAGACCGATCTTTCCCCTGTACACGAACACCGTAAC
AGATATCGCGTGGTTGCCACTTCAATCCAATCAGTTTGTGCGAACCTGG
GACAGAGACATGCTTCAACAAGCGATTGAAAGACTGCTCAGTTGGGAGA
GCTGGAACAAACGTGTCCAGGAAGAGTATGCCAAGCTGAAAGAAAAAAT
GGCTCAACTGAACGAGCAACTCGAAGGCGGTCAGGAATGGATCAGCTTG
CTAGAGCAGTACGAAGAAAACCGAGAGCGAGAGCTTAGGGAAAACATGA
CCGCTGCCAATGACAAGTATCGGATTACCAAGCGGCAAATGAAAGGCTG
GAACGAGCTGTACGAGCTATGGTCAACCTTTCCCGCCAGTGCCAGTCAC
GAGCAATACAAAGAGGCGCTCAAGCGTGTGCAGCAGCGACTGAGAGGGC
GGTTTGGGGATGCTCATTTCTTCCAGTATCTGATGGAAGAGAAGAACCG
CCTGATCTGGAAGGGGAATCCGCAGCGTATCCATTATTTTGTCGCGCGC
AACGAACTGACGAAACGGCTGGAGGAAGCCAAGCAAAGCGCCACGATGA
CGTTGCCCAATGCCAGGAAGCATCCATTGTGGGTGCGCTTCGATGCACG
GGGAGGAAATTTGCAAGACTACTACTTGACGGCTGAAGCGGACAAACCG
AGAAGCAGACGTTTTGTAACGTTTAGTCAGTTGATATGGCCAAGCGAAT
CGGGATGGATGGAAAAGAAAGACGTCGAGGTCGAGCTAGCTTTGTCCAG
GCAGTTTTACCAGCAGGTGAAGTTGCTGAAAAATGACAAAGGCAAGCAG
AAAATCGAGTTCAAGGATAAAGGTTCGGGCTCGACGTTTAACGGACACT
TGGGGGGAGCAAAGCTACAACTGGAGCGGGGCGATTTGGAGAAGGAAGA
AAAAAACTTCGAGGACGGGGAAATCGGCAGCGTTTACCTTAACGTTGTC
ATTGATTTCGAACCTTTGCAAGAAGTGAAAAATGGCCGCGTGCAGGCGC
CGTATGGACAAGTACTGCAACTCATTCGTCGCCCCAACGAGTTTCCCAA
GGTCACTACCTATAAGTCGGAGCAACTTGTTGAATGGATAAAAGCTTCG
CCACAACACTCGGCTGGGGTGGAGTCGCTGGCATCCGGTTTTCGTGTAA
TGAGCATAGACCTTGGGCTGCGCGCGGCTGCAGCGACTTCTATTTTTTC
TGTAGAAGAGAGTAGCGATAAAAATGCGGCTGATTTTTCCTACTGGATT
GAAGGAACGCCGCTGGTCGCTGTCCATCAGCGGAGCTATATGCTCAGGT
TGCCTGGTGAACAGGTAGAAAAACAGGTGATGGAAAAACGGGACGAGCG
GTTCCAGCTACACCAACGTGTGAAGTTTCAAATCAGAGTGCTCGCCCAA
ATCATGCGTATGGCAAATAAGCAGTATGGAGATCGCTGGGATGAACTCG
ACAGCCTGAAACAAGCGGTTGAGCAGAAAAAGTCGCCGCTCGATCAAAC
AGACCGGACATTTTGGGAGGGGATTGTCTGCGACTTAACAAAGGTTTTG
CCTCGAAACGAAGCGGACTGGGAACAAGCGGTAGTGCAAATACACCGAA
AAGCAGAGGAATACGTCGGAAAAGCCGTTCAGGCATGGCGCAAGCGCTT
TGCTGCTGACGAGCGAAAAGGCATCGCAGGTCTGAGCATGTGGAACATA
GAAGAATTGGAGGGCTTGCGCAAGCTGTTGATTTCCTGGAGCCGCAGGA
CGAGGAATCCGCAGGAGGTTAATCGCTTTGAGCGAGGCCATACCAGCCA
CCAGCGTCTGTTGACCCATATCCAAAACGTCAAAGAGGATCGCCTGAAG
CAGTTAAGTCACGCCATTGTCATGACTGCCTTGGGGTATGTTTACGACG
AGCGGAAACAAGAGTGGTGCGCCGAATACCCGGCTTGCCAGGTCATTCT
GTTTGAAAATCTGAGCCAGTACCGTTCTAACCTGGATCGCTCGACCAAA
GAAAACTCCACCTTGATGAAGTGGGCGCATCGCAGCATTCCGAAATACG
TCCACATGCAGGCGGAGCCATACGGGATTCAGATTGGCGATGTCCGGGC
GGAATATTCCTCTCGTTTTTACGCCAAGACAGGAACGCCAGGCATTCGT
TGTAAAAAGGTGAGAGGCCAAGACCTGCAGGGCAGACGGTTTGAGAACT
TGCAGAAGAGGTTAGTCAACGAGCAATTTTTGACGGAAGAACAAGTGAA
ACAGCTAAGGCCCGGCGACATTGTCCCGGATGATAGCGGAGAACTGTTC
ATGACCTTGACAGACGGAAGCGGAAGCAAGGAGGTCGTGTTTCTCCAGG
CCGATATTAACGCGGCGCACAATCTGCAAAAACGTTTTTGGCAGCGATA
CAATGAACTGTTCAAGGTTAGCTGCCGCGTCATCGTCCGAGACGAGGAA
GAGTATCTCGTTCCCAAGACAAAATCGGTGCAGGCAAAGCTGGGCAAAG
GGCTTTTTGTGAAAAAATCGGATACAGCCTGGAAAGATGTATATGTGTG
GGACAGCCAGGCAAAGCTTAAAGGTAAAACAACCTTTACAGAAGAGTCT
GAGTCGCCCGAACAACTGGAAGACTTTCAGGAGATCATCGAGGAAGCAG
AAGAGGCGAAAGGAACATACCGTACACTGTTCCGCGATCCTAGCGGAGT
CTTTTTTCCCGAATCCGTATGGTATCCCCAAAAAGATTTTTGGGGCGAG
GTGAAAAGGAAGCTGTACGGAAAATTGCGGGAACGGTTTTTGACAAAGG
CTCGGTAAGGGTGTGCAAGGAGAGTGAATGGCTTGTCCTGGATACCTGT
CCGCATGCTAAATGAAATTCAGTATTGTGAGCGACTGTACCATATTATG
CATGTGCAGGGGCTGTTTGAGGAAAGCGCAGACACGGTCGAAGGAGCAG
CACAACACAAGCGTGCAGAGACACATCTGCGCAAAAGCAAGGCAGCGCC
GGAAGAGATGTGGGGGGACGCTCCGTTTAGCTTGCAGCTCGGCGACCCT
GTGCTTGGCATTACGGGAAAGCTGGATGCCGTCTGTCTGGAAGAAGGTA
AGCAGTGGATTCCGGTAGAAGGAAAGCATTCGGCGTCGCCAGAAGGCGG
GCAGATGTTCACTGTAGGCGTGTATTCGCTGGACGGTTCTGCCTGGCCC
AACGACCAAATCCAATTGTGTGCGCAAGGCTTGCTGCTTCGCGCGAATG
GATATGAATCCGATTATGGCTACTTATACTACCGTGGCAATAAAAAGAA
GGTTCGCATTCCTTTTTCGCAGGAACTCATAGCGGCTACTCACGCCTGC
ATTCAAAAAGCTCATCAGCTTCGGGAAGCCGAAATTCCCCCTCCGTTGC
AGGAGTCGAAAAAGTGCTTTCGATGCTCGTTAAATTACGTATGCATGCC
TGACGAGACGAATTACATGTTGGGGTTGAGCGCAAACATCAGAAAGATT
GTGCCCAGTCGTCCAGATGGCGGGGTACTGTATGTTACAGAGCAGGGGG
CAAAACTGGGCAGAAGCGGAGAAAGCTTGACCATCACCTGCCGGGGCGA
AAAGATAGACGAAATCCCGATCAAAGACTTGATTCACGTGAGCTTGATG
GGGCATGTGCAATGCTCTACGCAGCTTCTGCACACCTTGATGAACTGTG
GCGTCCACGTCAGCTACTTGACTACGCATGGCACATTGACAGGAATAAT
GACTCCCCCTTTATCGAAAAACATTCGAACAAGAGCCAAGCAGTTTATC
AAATTTCAGCACGCGGAGATCGCCCTTGGAATCGCGAGAAGGGTCGTGT
ATGCGAAAATTTCCAATCAGCGCACGATGCTGCGCCGCAATGGCTCACC
AGATAAAGCAGTTTTAAAAGAGTTAAAAGAGCTTAGAGATCGCGCGTGG
GAGGCGCCATCACTGGAAATAGTGAGAGGTATCGAGGGACGTGCAGCAC
AGTTGTACATGCAGTTTTTCCCTACCATGTTAAAGCACCCAGTAGTAGA
CGGTATGGCGATCATGAACGGTCGCAACCGTCGCCCGCCCAAAGATCCG
GTCAATGCGCTGCTCTCCCTCGGCTATACGCTTCTTTCACGGGATGTTT
ACTCCGCATGTGCCAATGTCGGACTCGATCCACTGTTCGGCTTTTTCCA
TACGATGGAGCCGGGCAGACCAGCTTTGGCACTCGATCTGATGGAACCG
TTCCGCGCCTTGATTGCCGATAGCGTAGCGATACGTACCTTGAATACGG
AGGAACTCACCCTCGGGGACTTTTATTGGGGAAAAGACAGTTGTTATTT
GAAAAAGGCAGGAAGACAAACGTATTTCGCTGCCTATGAAAGACGGATG
AACGAGACGCTGACGCATCCGCAATTTGGGTATAAGCTCAGCTATCGCC
GTATGCTGGAGCTGGAAGCAAGGTTTTTGGCCCGGTATCTGGATGGAGA
GCTGGTGGAATATACGCCGCTCATGACAAGGTAGGAAATGACCATGCGA
CAATTTGTTCTGGTAAGCTATGATATTGCCGATCAAAAACGTTGGAGAA
AAGTATTCAAGCTGATGAAGGGGCAAGGCGAGCACGTCCAGTACTCGGT
GTTTCTGTGCCAACTCACCGAGATTCAGCAAGCCAAGCTAAAGGTAAGC
CTGGCGGAGCTGGTTCACCATGGAGAAGACCAGGTCATGTTTGTAAAAA
TCGGCCCAGTGACGAGAGATCAACTGGACAAGCGGATATCTACTGTTGG
CAGGGAGTTTCTGCCTCGCGATTTGACCAAATTTATCTATTAAGGAATG
AAGAAAGCTAGTTGTAACAAAAGTGGAAAAAGAGTAAAATAAAGGTGTC
AGTCGCACGCTATAGGCCATAAGTCGACTTACATATCCGTGCGTGTGCA
TTATGGGCCCATCCACAGGTCTATTCCCACGGATAATCACGACTTTCCA
CTAAGCTTTCGAATTTTATGATGCGAGCATCCTCTCAGGTCAAAAAAGC
CGGGGGATGCTCGAACTCTTTGTGGGCGTAGGCTTTCCAGAGTTTTTTA
GGGGAAGAGGCAGCCGATGGATAAGAGGAATGGCGATTGAATTTTGGCT
TGCTCGAAAAACGGGTCTGTAAGGCTTGCGGCTGTAGGGGTTGAGTGGG
AAGGAGTTCGAAAGCTTAGTGGAAAGCTTCGTGGTTAGCACCGGGGAGA
AGTCATTTAATAAGGCCACTGTTAAAAGTTCGAAAGCTTAGTGGAAAGC
TTCGTGGTTAGCACGCTAAAGTCCGTCTAAACTACTGAGATCTTAAATC
GGCGCTCAAATAAAAAACCTCGCTAATGCGAGGTTTCAGC
>D-locus
(SEQ ID NO: 64)
GAAGTTATGTTGATAAAATGGTTTATGAAAACGTGAGTCTGTGGTA
GTATTATAAACAATGATGGAATAAAGTGTTTTTTGCGCCGCACGGCATG
AATTCAGGGGTTAGCTTGGTTTTGTGTATAAATAAATGTTCTACATATT
TATTTTGTTTTTTGCGCCGCAAAATGCAACTGAAAGCCGCATCTAGAGC
ACCCTGTAGAAGACAGGGTTTTGAGAATAGCCCGACATAGAGGGCAATA
GACACGGGGAGAAGTCATTTAATAAGGCCACTGTTAAAAGTTTTGAGAA
TAGCCCGACATAGAGGGCAATAGACTTTTGCTTCGTCACGGATGGACTT
CACAATGGCAACAACGTTTTGAGAATAGCCCGACATAGTTATAGAGATG
TATAAATATAACCGATAAACATTGACTAATTTGTTGAAGTCAGTGTTTA
TCGGTTTTTTGTGTAAATATAGGAGTTGTTAGAATGATACTTTTTGCCT
AATTTTGGAACTTTATGAGGATATAAGATAGACTTGATAAAAAGGTAAA
AGAAAGGTTAAAGAGCATGGCAGGAATAGTGACCTGTGATGAAGATGAT
GGTAGAATTAAAAGTGTTCTTAAAGAAAAACAATATTGGATAAGGAAAA
TAATTCAATAGATAAAAAATTTAGGGGGAAAAATGAAAATATCAAAAGT
CGATCATACCAGAATGGCGGTTGCTAAAGGTAATCAACACAGGAGAGAT
GAGATTAGTGGGATTCTCTATAAGGATCCGACAAAGACAGGAAGTATAG
ATTTTGATGAACGATTCAAAAAACTGAATTGTTCGGCGAAGATACTTTA
TCATGTATTCAATGGAATTGCTGAGGGAAGCAATAAATACAAAAATATT
GTTGATAAAGTAAATAACAATTTAGATAGGGTCTTATTTACAGGTAAGA
GCTATGATCGAAAATCTATCATAGACATAGATACTGTTCTTAGAAATGT
TGAGAAAATTAATGCATTTGATCGAATTTCAACAGAGGAAAGAGAACAA
ATAATTGACGATTTGTTAGAAATACAATTGAGGAAGGGGTTAAGGAAAG
GAAAAGCTGGATTAAGAGAGGTATTACTAATTGGTGCTGGTGTAATAGT
TAGAACCGATAAGAAGCAGGAAATAGCTGATTTTCTGGAGATTTTAGAT
GAAGATTTCAATAAGACGAATCAGGCTAAGAACATAAAATTGTCTATTG
AGAATCAGGGGTTGGTGGTCTCGCCTGTATCAAGGGGAGAGGAACGGAT
TTTTGATGTCAGTGGCGCACAAAAGGGAAAAAGCAGCAAAAAAGCGCAG
GAGAAAGAGGCACTATCTGCATTTCTGTTAGATTATGCTGATCTTGATA
AGAATGTCAGGTTTGAGTATTTACGTAAAATTAGAAGACTGATAAATCT
ATATTTCTATGTCAAAAATGATGATGTTATGTCTTTAACTGAAATTCCG
GCAGAAGTGAATCTGGAAAAAGATTTTGATATCTGGAGAGATCACGAAC
AAAGAAAGGAAGAGAATGGAGATTTTGTTGGATGTCCGGACATACTTTT
GGCAGATCGTGATGTGAAGAAAAGTAACAGTAAGCAGGTAAAAATTGCA
GAGAGGCAATTAAGGGAGTCAATACGTGAAAAAAATATAAAACGATATA
GATTTAGCATAAAAACGATTGAAAAGGATGATGGAACATACTTTTTTGC
AAATAAGCAGATAAGTGTATTTTGGATTCATCGCATTGAAAATGCTGTA
GAACGTATATTAGGATCTATTAATGATAAAAAACTGTATAGATTACGTT
TAGGATATCTAGGAGAAAAAGTATGGAAGGACATACTCAATTTTCTCAG
CATAAAATACATTGCAGTAGGCAAGGCAGTATTCAATTTTGCAATGGAT
GATCTGCAGGAGAAGGATAGAGATATAGAACCCGGCAAGATATCAGAAA
ATGCAGTAAATGGATTGACTTCGTTTGATTATGAGCAAATAAAGGCAGA
TGAGATGCTGCAGAGAGAAGTTGCTGTTAATGTAGCATTCGCAGCAAAT
AATCTTGCTAGAGTAACTGTAGATATTCCGCAAAATGGAGAAAAAGAGG
ATATCCTTCTTTGGAATAAAAGTGACATAAAAAAATACAAAAAGAATTC
AAAGAAAGGTATTCTGAAATCTATACTTCAGTTTTTTGGTGGTGCTTCA
ACTTGGAATATGAAAATGTTTGAGATTGCATATCATGATCAGCCAGGTG
ATTACGAAGAAAACTACCTATATGACATTATTCAGATCATTTACTCGCT
CAGAAATAAGAGCTTTCATTTCAAGACATATGATCATGGGGATAAGAAT
TGGAATAGAGAACTGATAGGAAAGATGATTGAGCATGATGCTGAAAGAG
TCATTTCTGTTGAGAGGGAAAAGTTTCATTCCAATAACCTGCCGATGTT
TTATAAAGACGCTGATCTAAAGAAAATATTGGATCTCTTGTATAGCGAT
TATGCAGGACGTGCATCTCAGGTTCCGGCATTTAACACTGTCTTGGTTC
GAAAGAACTTTCCGGAATTTCTTAGGAAAGATATGGGCTACAAGGTTCA
TTTTAACAATCCTGAAGTAGAGAATCAGTGGCACAGTGCGGTGTATTAC
CTATATAAAGAGATTTATTACAATCTATTTTTGAGAGATAAAGAGGTAA
AGAATCTTTTTTATACTTCATTAAAAAATATAAGAAGTGAAGTTTCGGA
CAAAAAACAAAAGTTAGCTTCAGATGATTTTGCATCCAGGTGTGAAGAA
ATAGAGGATAGAAGTCTTCCGGAAATTTGTCAGATAATAATGACAGAAT
ACAATGCGCAGAACTTTGGTAATAGAAAAGTTAAATCTCAGCGTGTTAT
TGAAAAAAATAAGGATATTTTCAGACATTATAAAATGCTTTTGATAAAG
ACTTTAGCAGGTGCTTTTTCTCTTTATTTGAAGCAGGAAAGATTTGCAT
TTATTGGTAAGGCAACACCTATACCATACGAAACAACCGATGTTAAGAA
TTTTTTGCCTGAATGGAAATCCGGAATGTATGCATCGTTTGTAGAGGAG
ATAAAGAATAATCTTGATCTTCAAGAATGGTATATCGTCGGACGATTCC
TTAATGGGAGGATGCTCAATCAATTGGCAGGAAGCCTGCGGTCATACAT
ACAGTATGCGGAAGATATAGAACGTCGTGCTGCAGAAAATAGGAATAAG
CTTTTCTCCAAGCCTGATGAAAAGATTGAAGCATGTAAAAAAGCGGTCA
GAGTGCTTGATTTGTGTATAAAAATTTCAACTAGAATATCTGCGGAATT
TACTGACTATTTTGATAGTGAAGATGATTATGCAGATTATCTTGAAAAA
TATCTCAAGTATCAGGATGATGCCATTAAGGAATTGTCAGGATCTTCGT
ATGCTGCGTTGGATCATTTTTGCAACAAGGATGATCTGAAATTTGATAT
CTATGTAAATGCCGGACAGAAGCCTATCTTACAGAGAAATATCGTGATG
GCAAAGCTTTTTGGACCAGATAACATTTTGTCTGAAGTTATGGAAAAGG
TAACAGAAAGTGCCATACGAGAATACTATGACTATCTGAAGAAAGTTTC
AGGATATCGGGTAAGGGGAAAATGTAGTACAGAGAAAGAACAGGAAGAT
CTGCTAAAGTTCCAAAGATTGAAAAACGCAGTAGAATTCCGGGATGTTA
CTGAATATGCTGAGGTTATTAATGAGCTTTTAGGACAGTTGATAAGTTG
GTCATATCTTAGGGAGAGGGATCTATTATATTTCCAGCTGGGATTCCAT
TACATGTGTCTGAAAAACAAATCTTTCAAACCGGCAGAATATGTGGATA
TTCGTAGAAATAATGGTACGATTATACATAATGCGATACTTTACCAGAT
TGTTTCGATGTATATTAATGGACTGGATTTCTATAGTTGTGATAAAGAA
GGGAAAACGCTCAAACCAATTGAAACAGGAAAGGGCGTAGGAAGTAAGA
TAGGACAATTTATAAAGTATTCCCAGTATTTATACAATGATCCGTCATA
TAAGCTTGAGATCTATAATGCAGGATTAGAAGTTTTTGAAAACATTGAT
GAACATGATAATATTACAGATCTTAGAAAGTATGTGGATCATTTTAAGT
ATTATGCATATGGTAATAAAATGAGCCTGCTTGATCTGTATAGTGAATT
CTTCGATCGTTTCTTTACATATGATATGAAGTATCAGAAGAATGTAGTG
AATGTGTTGGAGAATATCCTTTTAAGGCATTTTGTAATTTTCTATCCGA
AGTTTGGATCAGGAAAAAAAGATGTTGGAATTAGGGATTGTAAAAAAGA
AAGAGCTCAGATTGAAATAAGTGAGCAGAGCCTCACATCGGAAGACTTC
ATGTTTAAGCTTGACGACAAAGCAGGAGAAGAAGCAAAGAAGTTTCCGG
CAAGGGATGAACGTTATCTCCAGACAATAGCCAAGTTGCTCTATTATCC
TAACGAAATTGAGGATATGAACAGATTCATGAAGAAAGGAGAAACGATA
AATAAAAAAGTTCAGTTTAATAGAAAAAAGAAGATAACCAGGAAACAAA
AGAATAATTCATCAAACGAGGTATTGTCTTCAACTATGGGTTATTTATT
TAAGAACATTAAATTGTAAAAAAGATTCGTTGTAGATAATTGATAGGTA
AAAGCTGACCGGAGCCTTTGGCTCCGGACAGTTGTATATAAGAGGATAT
TAATGACTGAAAATGATTTTTGTTGGAAGTCAGTTTTTTCTGTGGAAAG
CGAAATCGAATATGATGAGTATGCATATGGCAGAAGAGCTGTAGAAGGC
GAGAATACATATGATTACATTACTAAGGAAGAAAGACCGGAACTTAATG
ACGAATATGTAGCGAGACGTTGCATTTTCGGTAAAAAAGCAGGAAAAAT
ATCCAGGTCGGATTTTAGTAGGATAAGATCTGCGTTGGATCATGCGATG
ATAAATAATACACATACAGCATTTGCCAGATTTATCACTGAAAATCTGA
CGAGACTCAATCACAAAGAACATTTTCTGAATGTGACACGTGCATATTC
TAAACCTGATTCTGAAAAATTGATACAACCGAGATACTGGCAGTCGCCT
GTAGTTCCAAAGGATAAACAAATATATTATAGCAAGAATGCGATTAAAA
AATGGTGTGGTTACGAAGATGATATTCCGCCTCGTTCTGTGATAGTTCA
GATGTGTCTATTGTGGGGGACTGATCATGAAGAGGCAGATCATATCCTT
CGCAGTTCAGGATACGCGGCGCTTAGTCCTGTTGTACTTCGAGATCTTA
TCTATATGTATTATCTGGATCATCAGGATTTGCAAAAAAATGAGTTGAT
ATGGGAAGTAAAAAAGCAGTTGGATCACTTCGATTTGACAAATAGAAAT
TATGATACAAATCCTTTTGATGTAGGGGGCAGCGTAAATGATCATATCT
GTGAACTGAGCGAGCATATAGCGAAGGCTCATTATATTTATGAGAGGGC
TAAGGAAGGACCATTGCAAAATGTAATTCGGGATATTTTGGGAGATACA
CCTGCCCTTTATTCTGAAATGGCATTTCCTCAGCTAGCATCTATAAACA
GGTGTGCTTGCAATTCGCTTTCTTCATATCAAAAAAATATTTTTGATAC
TGACATAGCTATATATGCAGATGAAAAGGACACAAGAGGTAAATCAGAC
CGTATCCTTGTTGAGGGCGCATCTTCGAAATGGTATGAATTGAAGAAAC
GCGATGCTAATAATGTCAAAATTTCTGAAAAGCTGAGTATACTCAATAC
TATTCTTAAATTTAATAGTGTTTTTTGGGAAGAATGTTACCTTGATGGA
AATATAAAACAATCGAGCGGAAAGCGATCTGAGGCAGGAAAAATTCTTT
ATGGTCGCGACAACGGAAAAGAAAATGTCGGAGTTTCAAAATTGGAATT
GGTGCGGTATATGATAGCTGCAGGTCAGGAACAAAATCTGGGAAATTAC
CTGGTGAGTTCAGGATTTTGGAGAAAAAATCATATGCTGTCATTTATAC
AAGGCAATGATATAGCGCTTGATGAGATGGATGAATTGGATCTCTTAGA
CTATATTCTGATATATGCATGGGGATTTAGGGAAAATATCATTAAAAAG
AACAGTAATGTGAATTCTTTGGATGAAAAGACTAGAAAAGTGCAGTTTC
CGTTTATAAAGTTACTCATGGCAATTGCAAGAGATATCCAGATACTTAT
ATGTTCAGCACATGAAAAAACAGTCGATGAGTCATCTCGAAATGCAGCA
AAGAAGATAGATATATTGGGAAATTATATTCCTTTTCAGATTCATCTTC
AGAGAACTAAAAAAGATGGTGGAAGAGTGGTAATGGATACATTGTGTGC
TGATTGGATTGCGGATTATGAATGGTACATTGATCTTGAGAAAGGAACA
CTTGGATGAGCAGTGATGAAAGGATATTTAAAAAATTTTTGGAAAAAGG
ATCGATTTCTGAGCAGAAAAAGATGCTTTTAGAAGAAAAGAAATGTTCG
GATAAACTAACTGCACTGCTTGGGAATTACTGCATACCGATAGACAATA
TTTCAGAGTCAGACGGAAAAATATATGCGGTCTATAAGCTTCCAAAAAA
TGTTAAACCTTTGTCCGAAATCATTAATGATGTATCCTTTTCTGATTGT
ACGATGAGAGTACGTTTGCTTCTCATAAAGAGAATTCTGGAACTCGTGT
GTGCTTTTCACGAAAAAAAATGGTATTGTCTCAGTATTTCACCGGGAAT
GCTCATGGTTGAAGATTTTGATATACCGATGGGAAATGTCGGAAAAGTA
TTGATATATGATTTCAGAAATCCTGTTCCGTTCGAGTCAGTAAATGAAA
GACATAATTTTAACGTTTCAAATAAATACACTTCACCGGAGCTGCTCAT
CCATTCAAGATATGACGAGTCGAAATCTGTGAGTGAAAAATCAGATTTG
TATTCTGTTGCAAAAATTGCGGAAACAATAATAGGAGATTTTAACAGTA
TTATTGCAAATGGAAATTTGATACTACTTGCAATGCTTAGAGTTTTTAT
CAGTACAGGGAAAAGTCCGGAACCTGAGTATCGGTTTGAATCGTCGGAA
AATATGCTTTCAGTATTTGAAAATTTGATCAAAGAAAATTGTTTTTTTG
AAAAAAACGATTATACATCTATGTTTCATCAGGCGTATGACAATTTTTT
TGAATGGCAGGAATGTTTGATATCACCGGATCACTTGGATAAAAATATG
TTCGAGGCAGCTTTATCAAATCTTGAGGATCAGCTGCTTAGGGTTGATA
TTGATAAGTATAGAGCAGAGTACTTCTATAAGCTTCTCCGAGAGTTGTC
TAATAAATATAAAAATACAATTACTGATGAACAAAAGGTAAGGTTGGCA
ATACTTGGAATCAGAGCGAAAAATAATCTGGGAAAAAGTTTTGATGCAT
TGGAAATATATGAGTCAGTACGTGATTTAGAAACTATGTTGGAGGAGAT
GGCAGAGCTTAGTCCTGTCATTGCTTCGACATATATGGATTGCTACCGA
TATGCAGATGCGCAGAAAGTGGCGGAAGAAAACATTATCAGGCTTCATA
ATAGTAATATTCGTATGGAGAAAAAAAGAATACTGCTTGGAAGGTCATA
TAGTTCAAAAGGGTGCAGCATGGGGTTTCAGCATATTCTTGGTGCGGAT
GAGTCATTTGAACAGGCTTTATATTTCTTTAACGAAAAGGACAATTTTT
GGAAAGAAATATTTGAGAGCAGAAATTTAGAGGACAGCGATAGACTTAT
AAAGTCTTTACGAAGCAATACGCATATTACGCTGTTTCATTACATGCAA
TATGCATGTGAAACAAGGAGAAAGGAATTATATGGAGCACTTTCAGACA
AATATTTTATAGGTAAAGAATGGACAGAAAGACTCAAAGCATATATAAG
CAACAAGGATATATGGAAAAACTATTATGAGATATATATTCTGCTAAAG
GGTATTTATTGCTTCTATCCAGAAGTCATGTGTTCGTCTGCGTTTTATG
ATGAAATCCAAAAAATGTACGATCTTGAATTTGAAAAGGAAAAAATGTT
TTACCCATTGAGTCTGATAGAACTGTATCTTGCTCTGATAGAGATAAAA
GTTAATGGGAGTCTGACGGAGAATGCCGAGAAGTTGTTTAAACAGGCAT
TGACACATGACAATGAAGTCAAAAAAGGAAATATGAATATTCAGACCGC
CATTTGGTATCGAATATATGCACTGTATAACGATGTAAAAGATGAAACT
GATAAGAATAAAAGGCTTTTAAAACGGCTTATGATTCTTTGCCGACGAT
TTGGTTGGGCGGATATGTATAGTGCTTTGGAGAAGGATGGGAAGTTAAT
TGATTTTTTGAGATTTGAGGTATGTTAAATGATAACACTTGCATTAGAT
GAAAATGGCAAATTTGAAGATGCTTTTTCTAAAAAAAATGAAAAACCGA
TAATGATTGCGGGGATAATCTATGATGACAAGGGGAAAGAGTATGATGC
TGAGAATGAACGCTACAGGATATCCAGTTATCTGCGAGCAGTATGTGAC
AGTTTGGGTGCGAAATACCCTCAGGATCTACATTCAAATAGTAATGGAA
ATAAGGCGACTGTTGGGAAAGTAAAATGTAAAATTGGTGAAACACTAAA
GGAATTCTTGAGAGAAGGAACCTATGAAAAAAAGGAATTGCCGACAAAG
AACGGTTATTTAAATAAGAGATCTGGAAAATATGTAATGTTTGCAGAAC
TCAGGAGTAGTCAGGGAGTTAAAAAGCGTGTTAGTGGTTGGAATGACAA
TGATCTGACTCAGGATGAAAAGGTCAGCAATCTGTACCTTCATATGGCA
GAAAATGCCGTTGTCAGAATGCTCTTCCATAATCCTATATATGAAGATG
TAACAGATGTAAATCTCTATTTTCCCACGCGAAAAGTTGTTCTGAAAGA
TAGAGATAGAGAATACGATAAACAAGATTTCAAAATATATGGTGATAAG
GACAAGTGCGAAGCAGAAAGCGGGAGATTGGTGCATTATGATATCGTGT
CATCGGATTTTTACCGTACGATAATGGAGAACGAATGTACAAGAATTAA
TAAAAAGCAATTAAATGTTCATTATATGAACACAAGCCCAATTTCGTAC
TGGGAGAAAAATGAAAAATATAATACATTTTTATATTTGGCTGACATAG
TTTGTTCTATGCTGGATTATTACAAAAAGGGTTCGAGTCCGGCAGAGTG
GATGGATTCTTTTGCCGAATGGGGAAACAAATATTTTGGTGATGATCAG
ATAATCTTATTTGGGTATGATGATATAGATGACAAATACATGGAGGCTG
TAGATGCAGTAGGACAGGGAGAGTATTTTCATGCGCTGGATATTATATA
TGATGCGGAATGTAGTGGAAGTGAATTTGAGAAGCACTACAAAGATTAT
TGGTTTCCAAAGCTTATAAAAAAGATACGAATAACAGCAACTGTGGATA
ATTTATGCAGATCGATCTCAGATCTGGAGAGTTTTACATATCGAAGTAA
TCTTGATCAGCAGAAACTTTTGTGGATTTTTGAGGAAATCAAAGCTATC
GTCGATAAGGGAGATTTTGGAAAGAAATATCATACAGATCAGGTTATGT
TTGATATGTGTAATGCCGGTATTGCTGTGTACAATCATATCGGAGATTT
TGGGACTGCAAAGGAATACTATGATGAGTGCATGAAACACACTGGGGAT
GTGGATCTGGTAAAGATACTTCGTGCATCAAATAAAATGGTGGTCTTTC
TTGACGATGCTTTTAGGTATGGTGACGCGACAGAACGTGCCAGGAAGAA
TGTTGAATACCAAAAAGCTTTGCACGATATAAAGAGTGAGATTTGTCCG
GAAAAGAAAGATGAAGACTTGAACTATGCCATATCGCTCAGTCAATTTG
GACAGGCGCTTGCGTGTGAAAAAAATTCTGATGCAGAGAGTGTTTTCCT
AGAGTCGTTGCGGCATATGAGGAAAGGGACTGCCAATTATCAGATTACT
CTTTCATATTTACTCCATTTTTATCTGGATATGGGAATGACAGATTCTT
ATCGAGAAAAAACAAAGGACTATTTTGGAAGTGAAAAACCAAAGGAACA
GCTGAAAGAATTGCTGAAGTTATCGGGAAAGGATGATAGTATAGTTACT
TTCAAATTTGCAATGTATGTCTATTTACGTGCACTTTGGGTATTACAGG
AACCGCTTACTGATTTTATCAGAACAAGATTAGAGGACATACGTGAGAC
TCTTGTAAAGAAGAAAATGAGTGAACATATGGTTGGACATCCGTGGGAG
TTGATTTATAAATATCTGGCATTTCTTTTTTATCGTGATGGAAATTGTG
AAGCTGCTGAAAAATATATTCATAAAAGTGAAGAGTGCTTGGAAACACA
AGGACTGACTATAGATGCGATTATTCATAATGGTAAGTATGAATATGCA
GAATTGTCAGGTGACGAGGAGATGATGGCAAGAGAGAAAGCGTACTTTG
ATGAAAAAGGGATAGATAGAAAAAATGTTTGTACTTTTATGTATCATTG
ATGTTTAATAAGATTTGACCGAGGAGTGACAGGTAATCGCCGGTATATC
TGGTATTACCTGTCATTTTTTGATGAAATAAGCTACTTTTTGCCTAAAA
AACGAAACTGTTGGTGTTTTATGATGATTGTGTCAACAAAAGAGAGCAA
AAGAAGAGGAGAAAAGTAATGTCAATGATTTCATGTCCGAATTGTGGTG
GAGAGATATCTGAAAGGTCAAAGAAATGTGTTCATTGTGGATATGTGTT
AGTCGAAGAAGCTAAAGTAGTGTGCACAGAATGTGGAACTGAGGTAGAG
AGTGGCGCTGCTGTATGTCCGAAGTGCGGCTGTCCTGTAAATGATAGTG
AGACGCCTCAGAAAGTTGAAGTGACTAGGGTAAATGTATCTTCCGTAAT
CAGCAAAAAAGTCGTTGTAAGCATACTGATCGCAGTGATTACAATTGCA
GGTTTTTTCTATGGAGTGAAGTATTCGCAGGAAAAGAAAGCAATTGAAG
AGTCAGTAAAGCAGAAGGAAGACTATCAAAGTACGCTAGAGCTTGCTTC
GCTAATGATGCTTCAAGGAGCTTCGGATGCAGAAACTTGTGGGAATTTG
GTTAGGAAAGTGTGGAGCAACTGCATTTATAAGGAGAGGGATGAAGAAA
CCGACAAGTATACGTGTGATAGCAGGGGTGCAGGATGGTTTTATGATGA
TTTTAATGATGCATTAATGGCTCTTTACAGTGACAGCAGTTTTGGCAAG
AAGATAAATGAAATCAAAAACGGTCAGGAAACCGTTGCGGCGATGATGA
AAGATCTGAAAAATCCGCCGGATGAGATGGCAGATGCCTATGAGGATAT
TCAAAATTTTTATGTGTCCTATCTAACGCTGACAGAAATGGTTGTGAAT
CCAACTGGAAGTTTGAGTTCTTTTTCATCTGATTTTTCCGATGCGGATA
CGGAGGTGTCCAATGCCTATAGCCGGATGAAGTTGTATTTAGATTAAAC
TATTGAGGAAAAAATGGAGGTGCTTTAATGCGGGGGAGAAACTGTGGAG
GGTCATCAGGCGACGGACTGCTGGTACTTCTCGTACTGCTTGTCCTTTT
TTATAAAATCATGCCATTCATAGGTTTATGGATTTTAATTTTTGGTGAT
GCTGAACGTAAAGATCTGGGTATGGGTATGATTATTGTCGGGATAGTTC
TATATGTATTATTAGAGGTTTTTTAATGTGAGTTTCTGTGGTAAACTAT
AAAAGTACAAGCTTTTGCGCCGCACCGCATAAATAGCGGATTTATGACC
ATTATTTGGTGAAAAAAATGGTGTACACCTGTGTTTTTTTGTTTTGCGC
CGCAAAATGCGCCACGGAACCGCATGCAGAGCACCCTGCAAGAGACAGG
GTTATGAAAACAGCCCGACATAGAGGGCAATAGACACGGGGAGAAGTCA
TTTAATAAGGCCACTGTTAAAAGTTATGAAAACAGCCCGACATAGAGGG
CAATAGACATAAAGACCAAAAACAGGTCATCTGCATACTGTGTTATGAA
AACAGCCCGATATAGAGGGTGTGAGAGATATAGTTCTCGTCACAGTGCA
GAAAATGACCTATTATGTGCCGAAAAACAAAATGAAAAAAGAATGGAAA
GGCGTATTTAATGAAATGCTGATCTGTTGATTTGAATTAACAAAAAAAG
GTCGCCCCACGGATGACAAAAACATCCGGGGGCGACCCTTTT
>E-locus
(SEQ ID NO: 65)
TACTGTGTGCATAAGTCTTCCTTAGATCCATAGGTACAGCAGTTTT
ATTTATTAGCCTTAGAAAATGGAAAATAGAGCTTATAAATGATATGATA
TTTATGAATAAAATGATTGCATTCTCGTGCAAACTTTAAATATATTGAT
TATATCCTTTACATTGGTTGTTTTAATTACTATTATTAAGTAGGAATAC
GATATACCTCTAAATGAAAGAGGACTAAAACCCGCCAAAAGTATCAGAA
AATGTTATTGCAGTAAGAGACTACCTCTATATGAAAGAGGACTAAAACT
TTTAACAGTGGCCTTATTAAATGACTTCTGTAAGAGACTACCTCTATAT
GAAAGAGGACTAAAACGTCTAATGTGGATAAGTATAAAAACGCTTATCC
ATCATTTAGGTGTTTTATTTTTTTGTGATTATATGTACAATAGAAGAGA
GAAAAAAATCATTGAGGTGAAAACTATGAGAATTACTAAAGTAGAGGTT
GATAGAAAAAAAGTACTAATTTCTAGGGATAAAAACGGGGGCAAGTTAG
TTTATGAAAATGAAATGCAAGATAATACAGAACAAATCATGCATCACAA
AAAAAGTTCTTTTTACAAAAGTGTGGTAAACAAAACTATTTGTCGTCCT
GAACAAAAACAAATGAAAAAATTAGTTCATGGATTATTACAAGAAAATA
GTCAAGAAAAAATAAAAGTTTCAGATGTCACTAAACTTAATATCTCAAA
TTTCTTAAATCATCGTTTCAAAAAAAGTTTATATTATTTTCCTGAAAAT
AGTCCTGACAAAAGCGAAGAATACAGAATAGAAATAAATCTCTCCCAAT
TGTTAGAAGATAGCTTAAAAAAACAGCAAGGGACATTTATATGTTGGGA
ATCTTTTAGCAAAGACATGGAATTATACATTAATTGGGCGGAAAATTAT
ATTTCATCAAAAACGAAGCTAATAAAAAAATCCATTCGAAACAATAGAA
TTCAATCTACTGAATCAAGAAGTGGACAACTAATGGATAGATATATGAA
AGACATTTTAAATAAAAACAAACCTTTCGATATCCAATCAGTTAGCGAA
AAGTACCAACTTGAAAAATTGACTAGTGCTTTAAAAGCTACTTTTAAAG
AAGCGAAGAAAAACGACAAAGAGATTAACTATAAGCTTAAGTCCACTCT
CCAAAACCATGAAAGACAAATAATAGAAGAATTGAAGGAAAATTCCGAA
CTGAACCAATTTAATATAGAAATAAGAAAACATCTTGAAACTTATTTTC
CTATTAAGAAAACAAACAGAAAAGTTGGAGATATAAGGAATTTAGAAAT
AGGAGAAATCCAAAAAATAGTAAATCATCGGTTGAAAAATAAAATAGTT
CAACGCATTCTCCAAGAAGGGAAATTAGCTTCTTATGAGATTGAATCAA
CAGTTAACTCTAATTCCTTACAAAAAATTAAAATTGAAGAAGCATTTGC
CTTAAAGTTTATCAATGCTTGTTTATTTGCTTCTAACAATTTAAGGAAT
ATGGTATATCCTGTTTGCAAAAAGGATATATTAATGATAGGTGAATTTA
AAAATAGTTTTAAAGAAATAAAACACAAAAAATTCATTCGTCAATGGTC
GCAATTCTTCTCTCAAGAAATAACTGTTGATGACATTGAATTAGCTTCA
TGGGGGCTGAGAGGAGCCATTGCACCAATAAGAAATGAAATAATTCATT
TAAAGAAGCATAGCTGGAAAAAATTTTTTAATAACCCTACTTTCAAAGT
GAAAAAAAGTAAAATAATAAATGGGAAAACGAAAGATGTTACATCTGAA
TTCCTTTATAAAGAAACTTTATTTAAGGATTATTTCTATAGTGAGTTAG
ATTCTGTTCCAGAATTGATTATTAATAAAATGGAAAGTAGCAAAATTTT
AGATTATTATTCCAGTGACCAGCTTAACCAAGTTTTTACAATTCCGAAT
TTCGAATTATCTTTACTGACTTCGGCCGTTCCCTTTGCACCTAGCTTTA
AACGAGTTTATTTGAAAGGCTTTGATTATCAGAATCAAGATGAAGCACA
ACCGGATTATAATCTTAAATTAAATATCTATAACGAAAAAGCCTTTAAT
TCGGAGGCATTTCAGGCGCAATATTCATTATTTAAAATGGTTTATTATC
AAGTCTTTTTACCGCAATTCACTACAAATAACGATTTATTTAAGTCAAG
TGTGGATTTTATTTTAACATTAAACAAAGAACGGAAAGGTTACGCCAAA
GCATTTCAAGATATTCGAAAGATGAATAAAGATGAAAAGCCCTCAGAAT
ATATGAGTTACATTCAGAGTCAATTAATGCTCTATCAAAAAAAGCAAGA
AGAAAAAGAGAAAATTAATCATTTTGAAAAATTTATAAATCAAGTGTTT
ATTAAAGGTTTCAATTCTTTTATAGAAAAGAATAGATTAACCTATATTT
GCCATCCAACCAAAAACACAGTGCCAGAAAATGATAATATAGAAATACC
TTTCCACACGGATATGGATGATTCCAATATTGCATTTTGGCTTATGTGT
AAATTATTAGATGCTAAACAACTTAGCGAATTACGTAATGAAATGATAA
AATTCAGTTGTTCCTTACAATCAACTGAAGAAATAAGCACATTTACCAA
GGCGCGAGAAGTGATTGGTTTAGCTCTTTTAAATGGCGAAAAAGGATGT
AATGATTGGAAAGAACTTTTTGATGATAAAGAAGCTTGGAAAAAGAACA
TGTCCTTATATGTTTCCGAGGAATTGCTTCAATCATTGCCGTACACACA
AGAAGATGGTCAAACACCTGTAATTAATCGAAGTATCGATTTAGTAAAA
AAATACGGTACAGAAACAATACTAGAGAAATTATTTTCCTCCTCAGATG
ATTATAAAGTTTCAGCTAAAGATATCGCAAAATTACATGAATATGATGT
AACGGAGAAAATAGCACAGCAAGAGAGTCTACATAAGCAATGGATAGAA
AAGCCCGGTTTAGCCCGTGACTCAGCATGGACAAAAAAATACCAAAATG
TGATTAATGATATTAGTAATTACCAATGGGCTAAGACAAAGGTCGAATT
AACACAAGTAAGGCATCTTCATCAATTAACTATTGATTTGCTTTCAAGG
TTAGCAGGATATATGTCTATCGCTGACCGTGATTTCCAGTTTTCTAGTA
ATTATATTTTAGAAAGAGAGAACTCTGAGTATAGAGTTACAAGTTGGAT
ATTATTAAGTGAAAATAAAAATAAAAATAAATATAACGACTACGAATTG
TATAATCTAAAAAATGCCTCTATAAAAGTATCATCAAAAAATGATCCCC
AGTTAAAAGTTGATCTTAAGCAATTACGATTAACCTTAGAGTACTTAGA
ACTTTTTGATAACCGATTGAAAGAAAAACGAAATAACATTTCACATTTT
AATTACCTTAACGGACAGTTAGGGAACTCTATTTTAGAATTATTTGACG
ATGCTCGAGATGTACTTTCCTATGATCGTAAACTAAAGAATGCGGTGTC
TAAATCTTTGAAAGAAATTTTAAGCTCTCATGGAATGGAAGTGACATTT
AAACCACTATATCAAACCAATCATCATTTAAAAATTGATAAACTCCAAC
CTAAAAAAATACACCACTTAGGTGAAAAAAGTACTGTTTCTTCAAATCA
AGTTTCTAATGAATACTGTCAACTAGTAAGAACGCTATTAACGATGAAG
TAATTCTTTTAAAGCACATTAATTACCTCTAAATGAAAAGAGGACTAAA
ACTGAAAGAGGACTAAAACACCAGATGTGGATAACTATATTAGTGGCTA
TTAAAAATTCGTCGATATTAGAGAGGAAACTTTAGATGAAGATGAAATG
GAAATTAAAAGAAAATGACGTTCGCAAAGGGGTGGTGGTCATTGAGTAA
AATTGACATCGGAGAAGTAACCCACTTTTTACAAGGTCTAAAGAAAAGT
AACGAAAACGCCCGAAAAATGATAGAAGACATTCAATCGGCTGTCAAAG
CCTACGCTGATGATACAACTTTAAAAGGAAAAGCAGTGGATTCTTCACA
AAGATACTTTGATGAAACGTATACTGTTATTTGTAAAAGTATCATAGAA
GCATTAGATGAAAGCGAAGAGAGATTACAACAATATATTCATGATTTTG
GAGATCAAGTGGATTCTTCACCTAACGCACGAATTGATGCGGAATTACT
ACAAGAAGCAATGAGTAGGTTAGCTGACATAAAGCGGAAGCAAGAAGCA
CTTATGCAATCCTTATCTTCTTCTACAGCAACGCTTTACGAAGGCAAGC
AACAAGCGTTACACACTCAATTCACGGATGCGCTGGAGCAAGAAAAAAT
ATTGGAACGCTATATTACTTTTGAACAAACTCACGGGAATTTTTTTGAC
TCATTTGGAGAACTTGTCTATCGAACGGGACAAGCAGTGCGTGAATTAG
CTAATAACGTCACATTCGAGAGCCAAACAGGAAGCTATCATTTTGATAA
AATAGATGCTTCTAGATTCCAAACTTTGCAAGAAATGTTGCCAAAGGCA
AAGAAAAAAGCATTTAATTTTAATGACTACCAAATAACATGGAATGGCA
CCACGCACCTTTTATGGAAAAATGGTAAAGTGGATGCAGAAGCAACCAA
AGCTTATAACGAGGCGAAACTGAATGGAAAGCTACCAAAGGAAGGTAAT
GTAGCAACACAAGATGCAGAACTATTAAAAGGCATTTTGGCTTCACTGA
AAAACAAGAAAGATCCTATCACTGGAGCAGATATAAGCAGTGTGCATGT
ATTATCTATCCTTAGCGGGCTCGCATTCTCCTATACAGCTGGGAATTAT
AAGGGAAGAAAACTTACTGTTCCAAAAAGTTTCTTAGACAAATTAAAGA
AAAACCGAAAATCTAAAGTACCTAAACTATCTAGTTTATCAGAAAAACA
ACAACTAAAACTCGCAAATAAATACAAGAAAAAATCACCTATTCCAATT
CCAGATGATGCTAAAATCAAAGCTCAGACGAAAAAGGCTGGTTATGAAC
AAATATCTTATAAATGGAAAGAGAATGGGATAACCTTTGAAGTTAGATG
GCATACTAGGACACCAGGTGCACCAAAGGAACAAGGAAATACGTTTGTT
ATAGAAAGAAAAATTCAGGGTACAGCAGAAGGGAAAACAAAAGTTCAAC
AAATATTGGTTGGAGATAATAAGTGGGTGAGTAAAAGTGAGTGGCAAAA
GGCTATAACTGATAAGAAAAATGGTGTAAGTACCTCGGAGCAAAATAAA
ATGTTGTCTGATGGACATTGGAAAGAATAGAAAGGAGCAAAATGATGGA
AGATTATTATAAAGGTTTTGAGGGATATCCAGAGATAGATTTTTATACG
TATATAGATGATATGAAATTGGGTATAGCAATGTGGGAAGGATACTTTG
ACAACATTATGAAAGAAATTAATCCAAGTAACGGAAGATGGACTTCATT
AGCGTATTATTATCATTTAGATGAGGGGTGGTATGATGAAAGTCCTTGG
GAAATACCAAGTAATACAGAAGCATTAGAATTATTGGAAACAATCCATA
TATCTAATCTAGATACTATCACACAAGAGATATTACTTAAATTAATAAA
TTTATTAAAGAAGAATATAAATAGACAAGTTTATATTGAATACTCATAA
AAAAGATGATTATGATATATTATAGAACAAACGAACAAGCCCCAAATAC
GAGGTTTGTTCGTTTGTTTTCAATATAATTATTTGCCACCAAGTGAGAT
ATTACGGTTTTAAATAGCTTATTTGACGATACCAAACCCTGATAAGAGA
AAGAAGAAAGAGAAAGCTGGTGTAGTTGTTTTAAGTGAACTAGATAAAA
AATTAATAGCAAAACTTGAAAAAGATGGTGTGAAAATATCAAAAGAAGA
TGTTATAGGAATAAAATAATTGCCAGATGATGAGAAATCGTTTGGCTGG
AAAAAGGAAATCCATCCGCTGGATTTGAGCATATTCTTATTGAACATGG
TGAACAATTTGCTAAATAGGGAATTTAAAAGCTGAGTTACCTGATTTTT
TGATGACTGCTTTAGAAAAGGAAA
>F-locus
(SEQ ID NO: 66)
ATTCTTTAAAAATATCTAATAATTTATTTACTATATACTCTAATACATC
TTTTAACCTATCTAAAACATCATCACCTACAACATCCCAAAAATCATCT
AAAAAGTTAAAAAAATCCATCTTTATCAACTCCTATATCTATTTTTTAT
TGTGTAATTCCTGAGTTACAAAACCATTATAACACGTATTACACACGTA
GTCAATACTTCAAAAAAATTTTTTGTATATTTTTTTGAATAAGTAAATA
AAAAGAGCTGTGTAGCTCTTTATTAAAATCAATATTTTTATTTTGTTAA
CAAACTTAGACAACATTAAATTTAGAAACCTATATATATTTCAGTACTT
TTCATTTTTAGGTAGTCTAAATCAGAAATGGTTTTGTCTAAATGATGTA
TGTAAGTTTTAGTCCCCTTCGTTTTTAGGGTAGTCTAAATCAGAAGTCA
TTTAATAAGGCCACTGTTAAAAGTTTTAGTCCCCTTCGTTTTTAGGGTA
GTCTAAATCCCATCCAAATTATGGGATAATATGTTACTTTTTATTTTAA
TATTTGATTATTTATTGTTTTTTTACTGATTTAGATTACCCCTTTAATT
TATTTTACCATATTTTTCTCATAATGCAAACTAATATTCCAAAATTTTT
GTTTCTTTTCTTATGATCTTTTCTCCGATAGTTATTTCTCCAGATAAGA
TTTTCATTTTTTTGAATTGATCTTCTGTTAGAATTAATGTTCTTACTGA
TGAATTTTCTGGAACTATCATTGACAACTGATTTTCATAGGAAATTATT
TTTTCTTTTGTGCTAGAACTTACAATGTATACTGATTTTTGTACCTGAT
AATATCCTTTTCTTATAATTTCTTTTCTAAATTTTGCATATTCTTTTTT
TTCTTTTCCTGTTTGCATTGGAAAATCATACATTAGAATCCCTACATAA
TTAGTACTCATAATCCTCTATCCTTAACTCAGGAATTTCTACTTCTGAC
ATTTCTCCTGTAAAATAATTTCTAATATTATCTAAAAAATAATCAATCA
CTTGAGCCAATTCATATTTTTTATTTTTCCAATAAACTTTTTGTGTTAA
TACCAATAACAATTTTTGTCTTAATGATTTATTCAAACTTACTTCTTCC
TGTTGATTAAAATATACGATATAATCTACCATTGGACGAAATATTTCAA
TAATATCATCTGCAAAATTATAATTATTAAATTGTGAACTGTGATGTAT
TCCCAAACTTGGATGAAATCCTTTAGCCACAATTTTTGAAGAGATTAAG
CTTCTCAAAACCATATACCCATAATTTAATGCCGAATTTGTCCCGTCTT
CACCAAATCTCTTAAATTTTTTCCCAAAAAGTTCACCAAAATACATTCT
TGCAGCAATTGCTTCCTGATGTTCCGCTTCTTTTCCTTTTAATCTAATA
TTATTTTCATATGCTTCCAACTTATATGATACTTCCTGAGATTTTTTCA
AAAACTGCAATAAATTTCTTTGATTTTCTATTTTTCTCATTACAATTTT
TCTCCAGATTTCTTCTTTTTTATCGTCAATCCAGCTCACTTGCTCATTA
ATTCTTGTTGTTACTTGAAAATGATTATACAGTCCTAATGAATGTAAAA
CTGGCTGATGTTTTTCATTACAAATTATCAGTGGAATATTATGTTCTGA
TAATCTTAACTGTAATATTCCGCTAATTTTACATCTGCAATTTTCAACT
ACAATTGCCATGATATCATTTAAAGATACTTTATCAGCCTTATTTTCAT
CATCTTCATTTATCATCACAAGCTGGTTATTTAAAACTGATAATTCATT
GACTCTTGTTACATGGATAATATTAGACATTTTTATTACTCCTTTACTC
TAAAGCTTTATATTCAAACATAACTTTCACAAGTTCACACAATTCTTCT
GAATTTCTATCAGTCATTAATTTTTTCTTTTTTAAATTTTTCAAATGTA
CAATTTTTTCCGATTCTAAAGTCTGAATTTCTATTTTCTTATCTGCTCC
TATTTTAAATGTTGCTACAAAACCATATTCCTTTAATATATCCACTATT
GATTTCATAATTGCATTTTTAAGTTTTCTATCATAAGAAAGTAATTTTC
TTAAATTTTCCAGCACTTCTAAAAGTGAAATTTCAGCATGCGGAATATA
GTTAAAATGTGCAATATAGTTTCGTATATACAAATCTTTTTTCTCTTGT
TTTAATTTTTTTACTTTTTTATCAGAATAGATGCTTCTTTTTTCTACAT
TATCTTTGTATAATTCTTTATAAAAATTTATATATTTTTCAACAATTTG
CCCACTTTTATATTTTACATTTTTACTGTTATCAAAATTAAATATTTCT
TCAATATAATGATTTTCAGGAAATTCACCTTTCAATCTAAATCTTAAGT
CCCTTTCCCAGATCGAAGTATATCCCACAAGTCTGTGGAGTATTTTTAA
TAACAAGCCTTGCAACAAGTTTAATTCATTAAATTCCACTTTATTTTTC
AAATGAGTATATTTTTGTATATTTCCAATTGCTTTTTCATATTCTTTAT
AATCTTCATCATTAAATTTTTCATCTTTTTTAGGTCTTGCATATTTTCT
ATGTAAATTTTGCTGCATTGTATAATTTTTTTCTATTTCATTTTTTTTA
TTGCTGTATTCTTTCAATTCTTTTAAACTTATTTTATACTTCGCTTTAT
CAGCTATTTTTTCAAGTAAATTTAACATCCCATATTTTTTTATATTATA
AAAAGCTCTATGCTTTATAATATTTTCTCCATCAAAATATATTTTATTT
GTGTCAAATTTCTTCAATTCTTTCCTATCTTTTATTTTATTTTCATTAA
AATCTAAAAATTTTCCAATTTCATTCGCTTCTAATTCAAAATCTTCTGT
TACTCTATTATTATCTAAATTTAAAAGATTTATAAGTTCAAGTTCATCT
GAAAAAGTTTCTTCTTTATTTGCACTCTGATATTTTTCAAGACTTCCCT
TCAAATTAGTCAATTCTTTATGATTAAGCAATTTTAAAATTAAATAAAA
CATATTCAAATTTTCAGTGTATTTTAATATCTTTCCTAATTTTATCTCT
CTTACAAATTCATTTATTTCATGTGGAATTTCTTTATTCCTATTATGTT
TTTCATAATTTTTTAAAATTTTATCATATTTTTCTTTATTATCTTTTTT
TATTTTTATTTTAGAAAATATATCATTATTATCATTGTTATTATTACTT
TCTATATATTTTAAATTATTTTTATTCAAATAATCTATAAAACCTTTTA
AAAATATTTGTTGTATAAAATCAATGTATGTATTTTTTTCTTCTTTATC
TTGATTATTAATCATCTCCCTACTTTGTATAATAGCAAGATATTCTACT
GGTACAGTTTTTTCTATATTTTCAAATTTTTGATATTTATAATGTCCTG
TTTTTTGATTTCTTTGTTTATTTATTTTTATTACTTCATTAGTTATTTT
AAAAAAAACTTTACTATTTTTAACAAATTTATTAAGAAATTCACCATAA
TAAATATTTTTCAAAAGATATATTTGAGCATCTTTTTCTTCTTTATCCT
TAGGAACACTCCAAAAAAATTTTAAAGTATTTCTTAAATCTTCTATTTT
ATTATATAATTTCGTAAAAGAAGGAACAAAAGGAATATTCTTATTTACA
AAATTAAATTTTGTATTTTTTAAATATTTAATTATCACATCCTTTTCAT
AATAATTAAATACATTTGCACTATTTAACTGCTTAAATATCTTCAATTT
CAATTTTTTCTCATTTATTTCATTTTGAAACATTTTTTTTGAAATTTCA
GAAGGAGCTATATTTTTAAATGCAAATATATCTTTCCCTTCTAATTCCA
AATTAAAATGCACAATCCCATGTCTAATACTGCTAATAGCTTCATCAAT
ATTTGCAAAAAAATCTTCTATCTCATTTTTATTATCCATATTAAAATCA
TAACTATAGAACATTTTTAAATTTTCTTTTACTTCATTTTGCTTGTTTT
CATTATATATTTTATCAACTTCTCCAGAAACATATTTTTCTTCGCCCTT
ATTATTTTTTACAGTTTTTCCTCTCATTCTACCTGTAATATCATTCTCA
TTTTCAGTTTCAAGAATATTTCTCAATGAAAAATATGCAACCGAAGAAA
CTCCAATTATATTTCGTAAAAATGCTTCATTTTGTCTATTCCTAGCAAT
AAAATCACTTGTTGCAATCTCTCCAACTTGTAAATAATAATTGTATTTC
CCACAATTTCTTACATAAGTATCCAATTTATTTAGTAATTTGTTTTCAA
TTAATTTTTTTAAATTTTGATATTCAAATATTCTCTTAATTTTATCGTT
ACTTATGTTACTCAGTCTTTTATACACATAATTTTTCAAAAGCTGACTC
ATTTCAATTTCCACAAAATGACAAAAAGCATATTTTATATTTTTATCAT
TAAGTTCTTCTTTATCCAAATAATATTTATAAAACACTTGTGATTTTTT
TAATTCACTCATATCCGGAATTTTTTCAATTAATTCTTTTATATTATTT
ACATTTTGTATTTCTTCGTAAATAATTTTAGCAAAATTTTCTTTATCAT
TTTTTCTTCCAATTATTTTGTGATAGTATTCTCTTATTTTATATTTTTC
ATGTTTTTTTGAATTTTCTATTAAAAAAAATAACTTCTCAATATCTTCT
TTTTTATACAATTTATCAAATGCTTCCTGTACATTATTTATATAATCAT
TACGCTTTGCTGATTCTCTATAATAATCATAAATAATATTTCTTTTGCT
CTTCCCTCCAACTTTTTCAACATTATTTTCATTAATTTTCTGATAATTA
GCCTTATTTTCTTCAAATGAATATTTTAAAGAATTTATCTTATTCAATT
TTGCCTCAACATCTTTTCTAAATATTTCTAATTCTTCAGAGTTCACATC
TTCATTTAACAATATTTTCTTTAAAACTGAAAAACTATTTTTATTTTTT
AAATCATATTCTGAAATATCTTCTTCAGAATAATTTTTATCCTGTACTG
CATTTTTCTCTTTCCTATTCTTTAAATACAGAACACTATCTTTTAGATG
CAATACTTTATTTGAAAAAAACTTTTTTAAATTTTCTCTTCTTATTCTA
TTTTCTTCTTCACTTGCATTATCAGGATTTTTTATATATATATCCAGTC
TTATACTTAAAAGCTCTGACAATCTCTCACTAGTCCTATTTTCTTCGCT
CGTACTTTTTACTAATTTTCCCTCTTCAATATATTTTTTATGCGAAATT
CCATCAACTTTTGTAACTTTCATATATAAAAACCTCCTAATATCTATAT
TTTTTACTCAATACCTAATTCTTTTTTCAATGCTTTTTGTAAAATTTGT
GAAAAATTCAGATTTTTTTCCTGTGCCAATATATCTAACCAAACAGGAA
TTGTTAAAGTTTTCTTTTTAAGTGCATTTGTAACTTTTGCCACTTCATA
CACTGGATCAACAGATAAAATATACAAATACTGATTTTCTTTCAGTTTC
ACATCCTCCACTTTTGAAGGCTCAGGAAATTTTTTTCTTACATCCAAAA
AATCAGCCAAATGCAGACCCAATGTCTCTCTCAAATTGGAAACAGCCTC
CTCCATGCTATCTCCAAATGTAGCATAATAATTTATCTCTCCATCTTCA
AACTTATCAAAATCAACAATACAACCATAATAAGTCCCATCTTCCTTAG
TTACCACTGCTGGATAAAATACATCCATTTTAATTATCTCCAATCTATA
CCACGTGTTAAATACGTGTTTAAAAATATTTATAAAATTTTTTAGCATC
TCTGCTAAAATAAAACAATTATTTCAAATTTTTCTATTCCTTAATCACT
CATTGTTAGTGATTCTTTTTTTACTTGGACAATTTTTCATTTAATTTCT
TCAATTTTTTTAAAATCACATTTTTTTAATATTCCTTATTTAATTGCAA
ATTTTCATTACTTTTGGGGTGCTCTAAATCCCATCCAAATTATGGGATA
ATAATTTTTAGTGAAAGCAAGAAGGGACTAGAATTTAATCCCAACTTGT
TTTTCAATACTTCTTAATGTTCCTACAGGTATATCTTTTGAATATGGTA
CTGTGACCACACCTTCCACACCTGGGATCATCCATTGATAATGACTACC
TCTTATACGCACAACTTTTCCGCCTAATTTTCTAAATCTTTTTTCGAT
>G-locus
(SEQ ID NO: 67)
CTTTCTATCTTTTTCAAATAAAATTAGGCTCTAGTTAGCCTAATCGC
ATAATTATTTATTATAGTATAATTCTTATTTTTTTTCAACCTAAAAATT
TAAAACATCTCCAAAAATTTTCGTTTCAGAACAACCAAGCAACCATATT
CAAAAAACAATAAAAAATGAGCAAGAATTGAAATTTTATTCTCACTCAG
AAGTTATTTTTATTAAATATCACTTTTCGATATTGGGGTGGTCTATATC
AATTTAAAAGACAGAATAGATAATTCTTTAGAGTTTTAGTCCCCTTCGA
TATTGGGGTGGTCTATATCAGAAGTCATTTAATAAGGCCACTGTTAAAA
GTTTTAGTCCCCTTCGATATTGGGGTGGTCTATATCCCATCCTAATTTC
TTGCTGATGAGATATTTATTTCTAATTTTTCTATTTTGTCTTTATTTTC
AATACTTTCAATCCTATTTTTCTCTTTATTAATAATATAGAACCACCCT
ATACTATTATACCATATTTTTTGATTTTTCAAAATTCCAATATTTTGTT
TTGTGAAATTTTTTCTCCCATTGTCACTTCTCCTGCAAGTACCTTCATT
TTTTGAAACTGATCTTCTGTCAGGATAATGGAACGGATTGATGAATTTT
CTGGAGCGAGCATTGATAACTGTTTTTCTGCCAGTTCGATTTTTTCTTT
TGTTTTCGACCTCATTATATATACCGATTTTTGAAGCTGATAATATCCC
TTTTCTATCAATTTTTTCCTAAAAGTCCTATATTCAAATCTCTCAACAT
CTGTCTGCATAGGAAAATCATACATAAGCAGACCAAAATACTCAATACT
CATAGTCCATCACGCTCAATGTCGGAATTATCACTTCTTCATCTTTTAC
AAAATAATTTCGTATACTATCCAAATAATAGTCTACCGCTTGGAAAAAA
TCATATTTCTTATTGTTAAATAATACCTTCTGCTGTGCTACAAGAAGTA
TTTTTTGCCTTATTTCCTTACTTAATTTCACTTCATTCAAAATATCCTT
GTACATATAAACAAGATAATCCACCATAGGACGAAAAACCTCTATTATA
TCATCAGAAAAATTATAGGCATTAAACTGTGACTTATGATGTAATCCTA
AACTTGGATGAAATCCTTTTGCTACAATCTTTGATGATATTATAGCTCT
TAAAATCATATATCCATAATTAAGTGCAGAATTCACTCCATCTTCATCA
AATCTTTTAAAACTATTACTATACAATTCCTGAAAATATATCCTTGAAG
CTATTGCTTCCTGATGTTCTGCACTCGCATCATCTTTTTTCAAGTTTTC
CTTATATGTTTTCAGTCTTTCAATGGAAATATCACTTTTTTCAAGATAC
TCTAACAATGCTCTTTGATTTTCAATCTTATTCTCCACTATCCTGCTCC
ACAATTTTTCCTTTTTCTCTTTTTCCCACTCAATCTGCTCATTTATTCG
TAAAGTCACTTGAAAATGATTAAATAATCCCAGCGAATGAATTTCAGGC
TGATGTTTCTCGTTGCAAATAATAATCGGAATGTTATTTTCCACCAGCC
TCAACTGCAAAATCGCACTAATCTTACAATAGCAGTTTTCAATAACTAT
CGCAGATATATCATTCAAAGAAATCTTATTTTTCTCATCATTATTGTCT
TCATCAACCATTATAAGCTGATTATTCGATATTGACAAATCATCAGCCC
TTGTTATGTGAATTATATTGGGCATTTTAATCATACTCCTTATAAATTT
CATTCTTATAACGTATCATTCGTATTTTCTATTTTTGTTAAAAGTTCTA
TTATCAAGTTTTTAATATAATCAGAATTATAACTTTCTAATTCTAAAAC
AGAAACTTTTTTAGGTTTCATTAATCTTTCAAGTATATCATTATTACCG
ATAAGTTTAAATTTTTTCTTTAATTCATCATAATCTAAATTCACATCTT
TTTTAAATACTTCAAATACACTTGCATAAGTTGAATTATTATAACGTGT
ACTATATGATAATAAATTAGAAACTCTATCAATTTGTTCTGCAATACTG
TAATCAGCAAACGGATTTCTTACAATATAGAAATGTGAAATATAGTTTC
TAATACTTTCATTTTCCGGCTTATTAATTTCAGAATTTTCAGACAAATC
AATTCCAAATCCATAACATATTTTCTCAAATTTTTTATAAGATTCTTCA
TCAAAAAATTTATAGTATGCTGTTGTTGTATAAAAGCCATCAGATCCAT
TACGCTTAGGATAAGCTCTACTTATTCCAGTATTGTAGCCACTTAACTT
AATAATTCCTAATTCTCTTAGCCCATTTACAATATAGTGCATATCTCTT
TCAAATCTAGCCATTTGAATAGCAAGTTTCCAATTTATATCTATCAAAT
AACTTTCTATTTTATTCAAATAATTAAATTCTACCAAATCTCTAATTTT
TTTGTATTCAGAAACTCTATTATAATCTTTTTCAAATGATTTATAGTTT
TTATTTTGTATATTTTTTGCAAAAAAGTCATCATTTTCTTTCAATTTTT
TTATATACTTCTCTTTGTATTCTTTAGAATATCCATTTAGTTTATCATT
TAGATTTTTCAATATTGCATCAATTTCAGATATTTTATTTTTTCTAATA
TTTTTACCATCAATATTAAATAAAAATTTTGCATCAGCCATTTTAATAT
CATTTGAAATTAATCCATAAATTTTATCAAAATTTGGATTTCCAATATT
TAAAAATAAATTCTTTTTATAAATATATAATTCATTCTTACGTTCTTTA
GGATAATATATTTCTTGAAATTTATTTTCATTCTCTGATTCCATATCTT
CTATTAAATTATCTATTTCTTTTTTGTATTTTTTTAAAAAATCAGAATT
AAATATTATTCTACACAATATTTTACTCTTTATTTCCTGATCTTTATCT
TTTATATACTGATCAACCTTTTTTTTCAAATCCTTTTTATTTATGTTTG
ATAACTTTCTTTGTTCATCTTGTAATATATTCGATTTTTTATCTATCTC
AAATTTAGTTTCATCATCAAAAATTACAATTTTTTCTAATTTTTTCTCT
AAAACATCACAACCATTAATATCATCTTTAAATTCAGTTAATATATTAT
TTTTTATATCCTCATAATAATTATTAAAAATTTCTTTTTTAGTTTGTAT
TTTAAAATCATCAAAGTCTTTTTCTATCTCTTTCATTTTTTGAATAAAT
TCTTCTAAATTAAGATTCCAATTTTCAGTTATACATTCATTTCTCAAAG
TATTTAATTGCATTATTTCATCTAAAATATCTATAATATTTTGATATTC
TGAAGTATTTAACCAAACTGATGTTGCAAAAAATCTATTTCTAATTTTA
TTTATAACCGCATTACTATTTAACAGTGCAAATATTGAAATTATATATT
CAAAATCATCATTTATTACTATAGTTTTATCACTAGTCTTTACAGTTAT
TCTTTCGTAAGTTTTATTATCATTAATGTCTTTTATTTGTTTCTTAATT
TCTTGAATATTCATTTTAAAATCTGAAAAATCAAAAAGTTCCTCATAAT
TTTTTCTCAAATATCCAATATAACATTCTATTACTTTTTTCTGATATTT
TTTAATAGCTTTATTATTACCTTTTGAAGCAGAAATCTGAGCATTTTTA
TAATAATTTTCTATAATATTTTCATCTATTTCATCAATGTTTCCTAAAG
TTTTCTTTAATTCTTGTAAAAATATATTCTTACTTTCATTTTCTTCTAA
ATCATCTTCTAAAATTAATTTCTTATACAATTCTTTATTCACATATATT
AAAGCATTTAATACTATTTTTTCTGTTTCTATAGTATCAAATGGTTCAT
TCTTAGGATTATTCCTATATAAATTTAATATTTCAGGAAGTACTTTAGA
AAAGGATGGTAAATATTTAATATCATTATTATTTTCTTCTGAAATTTTA
ATATCATTTATTTTAGTAATTATATTTTTTTTATCTTTAAATACTACAT
CTAAATTTAATGCTTTTGACACTTCTTCATCTGATATTTTTAAATTTTG
AATTATATTTATGACTTTATTATAGTCATCTTGCGTTCCTTGTAAATCT
CTTTCCTTGCTAATCGCATGTAATATCCTGTTTCTTTCATTTGTTCCTA
TCTTTGTAAATTTCCTAATAAAATTATTTGTAATGTTATTTTTATTATC
TATAAAATCTAAGTCTCTTATTATTTTTATTTTTGAATTTAAAATTTTT
TTATCAAGTACGTAATTTTTTTCTCGATCTCCTCCAAAGAAATCTATAT
TTTCATCATTATTTATATTTTCTCTAGAAAAAATCTTATTTAATTCCAT
ATTGGTAGAAGCAAAAAAAGTAATCAATTCTAAATCCAATTCCTCTTTA
GCGTGAAGTCTAGAAAAATCATCAGTATTTACTGTTGTCATATCTATAT
CATTATGTCTTAATTTCCCTAAATACATAATATGCTCTAACGTATATTG
CTTAACTCTTTTTAAAATTTTTTCAGATAATATACTTTCATTTAAAATT
TTTTCTATTTCTATTTTTTCCATTTTCTTTAATCTGACTTTTTGTTCAT
TTACCAATATTTTTTCAATTCTTCCTTTCAAATATCGATATATGATTTT
ATATAGTTCTTTTTCTTCATCAGATTTCTTTGAAAATTTTTTCGAATCA
AAATTAACTTTATAATGTTTTTTAAATATTCCAAAAATTTCTGTATCAC
AATTTCCTTTTTTTAGTTCTTTTTCTAATTTTTTTATTAATTCATCTAT
TTTAAATTCTGCTAAAATTTTTTCTATTTTTTCTTTTATACTATTATTT
TTTATATTTTCTACAAAAAATTTTACAATTTTATCTTTTTTATTTTCTC
TTTCTATTTTAAATTTTTCGTGCTTATCTAATAGTACATAAGATTTTAT
ATATGTTCTATTTCTTCTCTTTTCAAGAAATTCATTATTAACTTTTTTT
ACTTTTTCAATTCTTTTAGTAATATTCCAAAATTCTAACTCTTTTATAA
CAAAATCAGCTATATCTTCTACTGTTAAATCTACATTTATATTTAAAAT
TTTTTCAACAAGCATTTTTTTATTTTTAGATTTCTTTTTATCACCACCA
ACATTAAGATAAAATTTTACAAAACCCAGAATTTCTAAATTACTTTTTA
TTTTTTCTCTTATTTCCATAAAATTAGTCAAAATAACATCTATTTTATC
ATCTTTCAATAATTTTTCTCTTAAATGTTCTTCATAATATCGATTTTCA
AATACTTTTTCTGTTTCATTTTCAATTATTTTTTCTATAATCTTATATA
AACTCATGTTAATATTTTTAAAAATTTCGTAAATTGATTTTTTTGTTTC
TAATTCATCATTTTCTATTATTCTTAATATTATTGAACAATCATTTAGT
GTTTTATTAGTATACTCATCTCTGATATCTATCTCTATTTCTTCTTCAT
TCTCTTGTCTCTTTATTTCTATTTTTTTATCATCTTTAGTTATTCCTTG
CCTAATTGCTTCATCTATTATTTTCTTTTTTGTAATCCCCAATGCTTTC
AATTTCTCAGATTTTCCATATGCTTCTATATATAATACAACTTCTTCTG
TTTCCAAAAAATCATCATTATTTTCTATTCTTATGATTCCTTCTTTACC
TTTCAACTTAAATAGAATATTTCCTGCATGAAATTTTCTTGTAAATTCT
TTAAGAATATTATCATTTTTTTTGTAATTAATATATTTTCTAATAAATT
TATTATTATCAATTTTTTCTTTATTATTATTTTCATTAATATTTAAAAT
GTATTTGTTTCCATCATAGTTCCTTTTAACTTTTACTTTCCGTTTTATT
TTAAAATCTTTTTTATCACGAACTTCATACCATCTCTTATGTCCAAATA
AATTTCCCATTCCAATCTCCTCGTTTCTACTTTAATCTAATAAAATATT
TTTAAATTAAATCAATTTTACATCTTTCTAATCAAAAATACAATTTTCC
ATTTTTAGTATACCACATCAATATTAAATCTCAAAAAAATAAGGAGCCG
TCAAACATAGCTCCCTACTTCTATTTACTCATAATCCCCATCTATCCTT
ACTTTTCGTAAAATCAATCCTTCTTTCGCCTTTAGATCCAACTTAATTT
TCCCATTTGAACCTGTTCTAAATGTTCTGCCTTCTGTTACCAAATCAAT
AAATCTTTCATCCTGATAATTTGTTTCAAATTCCACATTTTCCCAGCTG
TTAAACGAATTATTTATTACAACAATAATTAAATGATCCTCGATTACTC
TTTCATACACAATTATTT

### Example 3

### Further Evaluation of Cpf1 and Associated Components

[1599] Applicants carried out sequence alignments with Cas-Cpf1 orthologs and compared the domain structure and organization (FIG. 38A-N). An overview of Cpf1 loci alignment in shown in FIG. 39.

[1600] The sequences of Cpf1 loci in various orthologs are listed below:

>KKP36646_(modified) hypothetical protein UR27_
C0015G0004 [Peregrinibacteria bacterium
GW2011_GWA2_33_10]
(SEQ ID NO: 68)
MSNFFKNFTNLYELSKTLRFELKPVGDTLTNMKDHLEYDEKLQTFLK
DQNIDDAYQALKPQFDEIHEEFITDSLESKKAKEIDFSEYLDLFQEKKEL
NDSEKKLRNKIGETFNKAGEKWKKEKYPQYEWKKGSKIANGADILSCQDM
LQFIKYKNPEDEKIKNYIDDTLKGFFTYFGGFNQNRANYYETKKEASTAV
ATRIVHENLPKFCDNVIQFKHIIKRKKDGTVEKTERKTEYLNAYQYLKNN
NKITQIKDAETEKMIESTPIAEKIFDVYYFSSCLSQKQIEEYNRIIGHYN
LLINLYNQAKRSEGKHLSANEKKYKDLPKFKTLYKQIGCGKKKDLFYTIK
CDTEEEANKSRNEGKESHSVEEIINKAQEAINKYFKSNNDCENINTVPDF
INYILTKENYEGVYWSKAAMNTISDKYFANYHDLQDRLKEAKVFQKADKK
SEDDIKIPEAIELSGLFGVLDSLADWQTTLFKSSILSNEDKLKIITDSQT
PSEALLKMIFNDIEKNMESFLKETNDIITLKKYKGNKEGTEKIKQWFDYT
LAINRMLKYFLVKENKIKGNSLDTNISEALKTLIYSDDAEWFKWYDALRN
YLTQKPQDEAKENKLKLNFDNPSLAGGWDVNKECSNFCVILKDKNEKKYL
AIMKKGENTLFQKEWTEGRGKNLTKKSNPLFEINNCEILSKMEYDFWADV
SKMIPKCSTQLKAVVNHFKQSDNEFIFPIGYKVTSGEKFREECKISKQDF
ELNNKVFNKNELSVTAMRYDLSSTQEKQYIKAFQKEYWELLFKQEKRDTK
LTNNEIFNEWINFCNKKYSELLSWERKYKDALTNWINFCKYFLSKYPKTT
LFNYSFKESENYNSLDEFYRDVDICSYKLNINTTINKSILDRLVEEGKLY
LFEIKNQDSNDGKSIGHKNNLHTIYWNAIFENFDNRPKLNGEAEIFYRKA
ISKDKLGIVKGKKTKNGTEIIKNYRFSKEKFILHVPITLNFCSNNEYVND
IVNTKFYNFSNLHFLGIDRGEKHLAYYSLVNKNGEIVDQGTLNLPFTDKD
GNQRSIKKEKYFYNKQEDKWEAKEVDCWNYNDLLDAMASNRDMARKNWQR
IGTIKEAKNGYVSLVIRKIADLAVNNERPAFIVLEDLNTGFKRSRQKIDK
SVYQKFELALAKKLNFLVDKNAKRDEIGSPTKALQLTPPVNNYGDIENKK
QAGIMLYTRANYTSQTDPATGWRKTIYLKAGPEETTYKKDGKIKNKSVKD
QIIETFTDIGFDGKDYYFEYDKGEFVDEKTGEIKPKKWRLYSGENGKSLD
RFRGEREKDKYEWKIDKIDIVKILDDLFVNFDKNISLLKQLKEGVELTRN
NEHGTGESLRFAINLIQQIRNTGNNERDNDFILSPVRDENGKHFDSREYW
DKETKGEKISMPSSGDANGAFNIARKGIIMNAHILANSDSKDLSLFVSDE
EWDLHLNNKTEWKKQLNIFSSRKAMAKRKK
>KKR91555 (modified)_hypothetical protein UU43_
C0004G0003 [Parcubacteria (Falkowbacteria)
bacterium GW2011_GWA2_41_14]
(SEQ ID NO: 69)
MLFFMSTDITNKPREKGVFDNFTNLYEFSKTLTFGLIPLKWDDNKKMI
VEDEDFSVLRKYGVIEEDKRIAESIKIAKFYLNILHRELIGKVLGSLKFE
KKNLENYDRLLGEIEKNNKNENISEDKKKEIRKNFKKELSIAQDILLKKV
GEVFESNGSGILSSKNCLDELTKRFTRQEVDKLRRENKDIGVEYPDVAYR
EKDGKEETKSFFAMDVGYLDDFHKNRKQLYSVKGKKNSLGRRILDNFEIC
KNKKLYEKYKNLDIDFSEIERNFNLTLEKVFDFDNYNERLTQEGLDEYAK
ILGGESNKQERTANIHGLNQIINLYIQKKQSEQKAEQKETGKKKIKFNKK
DYPTFTCLQKQILSQVFRKEIIIESDRDLIRELKFFVEESKEKVDKARGI
IEFLLNHEENDIDLAMVYLPKSKINSFVYKVFKEPQDFLSVFQDGASNLD
FVSFDKIKTHLENNKLTYKIFFKTLIKENHDFESFLILLQQEIDLLIDGG
ETVTLGGKKESITSLDEKKNRLKEKLGWFEGKVRENEKMKDEEEGEFCST
VLAYSQAVLNITKRAEIFWLNEKQDAKVGEDNKDMIFYKKFDEFADDGFA
PFFYFDKFGNYLKRRSRNTTKEIKLHFGNDDLLEGWDMNKEPEYWSFILR
DRNQYYLGIGKKDGEIFHKKLGNSVEAVKEAYELENEADFYEKIDYKQLN
IDRFEGIAFPKKTKTEEAFRQVCKKRADEFLGGDTYEFKILLAIKKEYDD
FKARRQKEKDWDSKFSKEKMSKLIEYYITCLGKRDDWKRFNLNFRQPKEY
EDRSDFVRHIQRQAYWIDPRKVSKDYVDKKVAEGENIFLFKVHNKDFYDF
ERKSEDKKNHTANLFTQYLLELFSCENIKNIKSKDLIESIFELDGKAEIR
FRPKTDDVKLKIYQKKGKDVTYADKRDGNKEKEVIQHRRFAKDALTLHLK
IRLNFGKHVNLFDFNKLVNTELFAKVPVKILGMDRGENNLIYYCFLDEHG
EIENGKCGSLNRVGEQIITLEDDKKVKEPVDYFQLLVDREGQRDWEQKNW
QKMTRIKDLKKAYLGNVVSWISKEMLSGIKEGVVTIGVLEDLNSNFKRTR
FFRERQVYQGFEKALVNKLGYLVDKKYDNYRNVYQFAPIVDSVEEMEKNK
QIGTLVYVPASYTSKICPHPKCGWRERLYMKNSASKEKIVGLLKSDGIKI
SYDQKNDRFYFEYQWEQEHKSDGKKKKYSGVDKVFSNVSRMRWDVEQKKS
IDFVDGTDGSITNKLKSLLKGKGIELDNINQQIVNQQKELGVEFFQSIIF
YFNLIIVIQIRNYDKEKSGSEADYIQCPSCLFDSRKPEMNGKLSAITNGD
ANGAYNIARKGFMQLCRIRENPQEPMKLITNREWDEAVREWDIYSAAQKI
PVLSEEN
>KDN25524_(modified) hypothetical protein
MBO_03467 [Moraxella bovoculi 237]
(SEQ ID NO: 70)
MLFQDFTHLYPLSKTVRFELKPIDRTLEHIHAKNFLSQDETMADMHQ
KVKVILDDYHRDFIADMMGEVKLTKLAEFYDVYLKFRKNPKDDELQKQLK
DLQAVLRKEIVKPIGNGGKYKAGYDRLFGAKLFKDGKELGDLAKFVIAQE
GESSPKLAHLAHFEKFSTYFTGFHDNRKNMYSDEDKHTAIAYRLIHENLP
RFIDNLQILTTIKQKHSALYDQIINELTASGLDVSLASHLDGYHKLLTQE
GITAYNTLLGGISGEAGSPKIQGINELINSHHNQHCHKSERIAKLRPLHK
QILSDGMSVSFLPSKFADDSEMCQAVNEFYRHYADVFAKVQSLFDGFDDH
QKDGIYVEHKNLNELSKQAFGDFALLGRVLDGYYVDVVNPEFNERFAKAK
TDNAKAKLTKEKDKFIKGVHSLASLEQAIEHYTARHDDESVQAGKLGQYF
KHGLAGVDNPIQKIHNNHSTIKGFLERERPAGERALPKIKSGKNPEMTQL
RQLKELLDNALNVAHFAKLLTTKTTLDNQDGNFYGEFGVLYDELAKIPTL
YNKVRDYLSQKPFSTEKYKLNFGNPTLLNGWDLNKEKDNFGVILQKDGCY
YLALLDKAHKKVFDNAPNTGKSIYQKMIYKYLEVRKQFPKVFFSKEAIAI
NYHPSKELVEIKDKGRQRSDDERLKLYRFILECLKIHPKYDKKFEGAIGD
IQLFKKDKKGREVPISEKDLFDKINGIFSSKPKLEMEDFFIGEFKRYNPS
QDLVDQYNIYKKIDSNDNRKKENFYNNHPKFKKDLVRYYYESMCKHEEWE
ESFEFSKKLQDIGCYVDVNELFTEIETRRLNYKISFCNINADYIDELVEQ
GQLYLFQIYNKDFSPKAHGKPNLHTLYFKALFSEDNLADPIYKLNGEAQI
FYRKASLDMNETTIHRAGEVLENKNPDNPKKRQFVYDIIKDKRYTQDKFM
LHVPITMNFGVQGMTIKEFNKKVNQSIQQYDEVNVIGIDRGERHLLYLTV
INSKGEILEQCSLNDITTASANGTQMTTPYHKILDKREIERLNARVGWGE
IETIKELKSGYLSHVVHQISQLMLKYNAIVVLEDLNFGFKRGRFKVEKQI
YQNFENALIKKLNHLVLKDKADDEIGSYKNALQLTNNFTDLKSIGKQTGF
LFYVPAWNTSKIDPETGFVDLLKPRYENIAQSQAFFGKFDKICYNADKDY
FEFHIDYAKFTDKAKNSRQIWTICSHGDKRYVYDKTANQNKGAAKGINVN
DELKSLFARHHINEKQPNLVMDICQNNDKEFHKSLMYLLKTLLALRYSNA
SSDEDFILSPVANDEGVFFNSALADDTQPQNADANGAYHIALKGLWLLNE
LKNSDDLNKVKLAIDNQTWLNFAQNR
>KKT48220_(modified) hypothetical protein UW39_
C0001G0044 [Parcubacteria bacterium
GW2011_GWC2_44_17]
(SEQ ID NO: 71)
MENIFDQFIGKYSLSKTLRFELKPVGKTEDFLKINKVFEKDQTIDDSYN
QAKFYFDSLHQKFIDAALASDKTSELSFQNFADVLEKQNKIILDKKREM
GALRKRDKNAVGIDRLQKEINDAEDIIQKEKEKIYKDVRTLFDNEAESW
KTYYQEREVDGKKITFSKADLKQKGADFLTAAGILKVLKYEFPEEKEKE
FQAKNQPSLFVEEKENPGQKRYIFDSFDKFAGYLTKFQQTKKNLYAADG
TSTAVATRIADNFIIFHQNTKVFRDKYKNNHTDLGFDEENIFEIERYKN
CLLQREIEHIKNENSYNKIIGRINKKIKEYRDQKAKDTKLTKSDFPFFK
NLDKQILGEVEKEKQLIEKTREKTEEDVLIERFKEFIENNEERFTAAKK
LMNAFCNGEFESEYEGIYLKNKAINTISRRWFVSDRDFELKLPQQKSKN
KSEKNEPKVKKFISIAEIKNAVEELDGDIFKAVFYDKKIIAQGGSKLEQ
FLVIWKYEFEYLFRDIERENGEKLLGYDSCLKIAKQLGIFPQEKEAREK
ATAVIKNYADAGLGIFQMMKYFSLDDKDRKNTPGQLSTNFYAEYDGYYK
DFEFIKYYNEFRNFITKKPFDEDKIKLNFENGALLKGWDENKEYDFMGV
ILKKEGRLYLGIMHKNHRKLFQSMGNAKGDNANRYQKMIYKQIADASKD
VPRLLLTSKKAMEKFKPSQEILRIKKEKTFKRESKNFSLRDLHALIEYY
RNCIPQYSNWSFYDFQFQDTGKYQNIKEFTDDVQKYGYKISFRDIDDEY
INQALNEGKMYLFEVVNKDIYNTKNGSKNLHTLYFEHILSAENLNDPVF
KLSGMAEIFQRQPSVNEREKITTQKNQCILDKGDRAYKYRRYTEKKIMF
HMSLVLNTGKGEIKQVQFNKIINQRISSSDNEMRVNVIGIDRGEKNLLY
YSVVKQNGEIIEQASLNEINGVNYRDKLIEREKERLKNRQSWKPVVKIK
FRDLKKGYISHVIHKICQLIEKYSAIVVLEDLNMRFKQIRGGIERSVYQ
QFEKALIDKLGYLVFKDNRDLRAPGGVLNGYQLSAPFVSFEKMRKQTGI
LFYTQAEYTSKTDPITGKNVYISNSASLDKIKEAVKKFDAIGWDGKEQS
YFFKYNPYNLADEKYKNSTVSKEWAIFASAPRIRRQKGEDGYWKYDRVK
VNEEFEKLLKVWNFVNPKATDIKQEIIKKEKAGDLQGEKELDGRLRNFW
HSFIYLFNLVLELRNSFSLQIKIKAGEVIAVDEGVDFIASPVKPFFTTP
NPYIPSNLCWLAVENADANGAYNIARKGVMILKKIREHAKKDPEFKKLP
NLFISNAEWDEAARDWGKYAGTTALNLDH
>WP_031492824_(modified) hypothetical protein
[Succinivibrio dextrinosolvens]
(SEQ ID NO: 72)
MSSLTKFTNKYSKQLTIKNELIPVGKTLENIKENGLIDGDEQLNENYQK
AKIIVDDFLRDFINKALNNTQIGNWRELADALNKEDEDNIEKLQDKIRGI
IVSKFETFDLFSSYSIKKDEKIIDDDNDVEEEELDLGKKTSSFKYIFKKN
LFKLVLPSYLKTTNQDKLKIISSFDNFSTYFRGFFENRKNIFTKKPISTS
IAYRIVHDNFPKFLDNIRCFNVWQTECPQLIVKADNYLKSKNVIAKDKSL
ANYFTVGAYDYFLSQNGIDFYNNIIGGLPAFAGHEKIQGLNEFINQECQK
DSELKSKLKNRHAFKMAVLFKQILSDREKSFVIDEFESDAQVIDAVKNFY
AEQCKDNNVIFNLLNLIKNIAFLSDDELDGIFIEGKYLSSVSQKLYSDWS
KLRNDIEDSANSKQGNKELAKKIKTNKGDVEKAISKYEFSLSELNSIVHD
NTKFSDLLSCTLHKVASEKLVKVNEGDWPKHLKNNEEKQKIKEPLDALLE
IYNTLLIFNCKSFNKNGNFYVDYDRCINELSSVVYLYNKTRNYCTKKPYN
TDKFKLNFNSPQLGEGFSKSKENDCLTLLFKKDDNYYVGIIRKGAKINFD
DTQAIADNTDNCIFKMNYFLLKDAKKFIPKCSIQLKEVKAHFKKSEDDYI
LSDKEKFASPLVIKKSTFLLATAHVKGKKGNIKKFQKEYSKENPTEYRNS
LNEWIAFCKEFLKTYKAATIFDITTLKKAEEYADIVEFYKDVDNLCYKLE
FCPIKTSFIENLIDNGDLYLFRINNKDFSSKSTGTKNLHTLYLQAIFDER
NLNNPTIMLNGGAELFYRKESIEQKNRITHKAGSILVNKVCKDGTSLDDK
IRNEIYQYENKFIDTLSDEAKKVLPNVIKKEATHDITKDKRFTSDKFFFH
CPLTINYKEGDTKQFNNEVLSFLRGNPDINIIGIDRGERNLIYVTVINQK
GEILDSVSFNTVTNKSSKIEQTVDYEEKLAVREKERIEAKRSWDSISKIA
TLKEGYLSAIVHEICLLMIKHNAIVVLENLNAGFKRIRGGLSEKSVYQKF
EKMLINKLNYFVSKKESDWNKPSGLLNGLQLSDQFESFEKLGIQSGFIFY
VPAAYTSKIDPTTGFANVLNLSKVRNVDAIKSFFSNFNEISYSKKEALFK
FSFDLDSLSKKGFSSFVKFSKSKWNVYTFGERIIKPKNKQGYREDKRINL
TFEMKKLLNEYKVSFDLENNLIPNLTSANLKDTFWKELFFIFKTTLQLRN
SVTNGKEDVLISPVKNAKGEFFVSGTHNKTLPQDCDANGAYHIALKGLMI
LERNNLVREEKDTKKIMAISNVDWFEYVQK
RRGVL
>KKT50231_(modified) hypothetical protein UW40_
C0007G0006 [Parcubacteria bacterium
GW2011_GWF2_44_17]
(SEQ ID NO: 73)
MKPVGKTEDFLKINKVFEKDQTIDDSYNQAKFYFDSLHQKFIDAALAS
DKTSELSFQNFADVLEKQNKIILDKKREMGALRKRDKNAVGIDRLQKEIN
DAEDIIQKEKEKIYKDVRTLFDNEAESWKTYYQEREVDGKKITFSKADLK
QKGADFLTAAGILKVLKYEFPEEKEKEFQAKNQPSLFVEEKENPGQKRYI
FDSFDKFAGYLTKFQQTKKNLYAADGTSTAVATRIADNFIIFHQNTKVFR
DKYKNNHTDLGFDEENIFEIERYKNCLLQREIEHIKNENSYNKIIGRINK
KIKEYRDQKAKDTKLTKSDFPFFKNLDKQILGEVEKEKQLIEKTREKTEE
DVLIERFKEFIENNEERFTAAKKLMNAFCNGEFESEYEGIYLKNKAINTI
SRRWFVSDRDFELKLPQQKSKNKSEKNEPKVKKFISIAEIKNAVEELDGD
IFKAVFYDKKIIAQGGSKLEQFLVIWKYEFEYLFRDIERENGEKLLGYDS
CLKIAKQLGIFPQEKEAREKATAVIKNYADAGLGIFQMMKYFSLDDKDRK
NTPGQLSTNFYAEYDGYYKDFEFIKYYNEFRNFITKKPFDEDKIKLNFEN
GALLKGWDENKEYDFMGVILKKEGRLYLGIIVIHKNHRKLFQSMGNAKGD
NANRYQKMIYKQIADASKDVPRLLLTSKKAMEKFKPSQEILRIKKEKTFK
RESKNFSLRDLHALIEYYRNCIPQYSNWSFYDFQFQDTGKYQNIKEFTDD
VQKYGYKISFRDIDDEYINQALNEGKMYLFEVVNKDIYNTKNGSKNLHTL
YFEHILSAENLNDPVFKLSGMAEIFQRQPSVNEREKITTQKNQCILDKGD
RAYKYRRYTEKKIMFHMSLVLNTGKGEIKQVQFNKIINQRISSSDNEMRV
NVIGIDRGEKNLLYYSVVKQNGEIIEQASLNEINGVNYRDKLIEREKERL
KNRQSWKPVVKIKDLKKGYISHVIHKICQLIEKYSAIVVLEDLNMRFKQI
RGGIERSVYQQFEKALIDKLGYLVFKDNRDLRAPGGVLNGYQLSAPFVSF
EKMRKQTGILFYTQAEYTSKTDPITGFRKNVYISNSASLDKIKEAVKKFD
AIGWDGKEQSYFFKYNPYNLADEKYKNSTVSKEWAIFASAPRIRRQKGED
GYWKYDRVKVNEEFEKLLKVWNFVNPKATDIKQEIIKKEKAGDLQGEKEL
DGRLRNFWHSFIYLFNLVLELRNSFSLQIKIKAGEVIAVDEGVDFIASPV
KPFFTTPNPYIPSNLCWLAVENADANGAYNIARKGVMILKKIREHAKKDP
EFKKLPNLFISNAEWDEAARDWGKYAGTTALNLDH
>WP_004356401_(modified) hypothetical protein
[Prevotella disiens]
(SEQ ID NO: 74)
MENYQEFTNLFQLNKTLRFELKPIGKTCELLEEGKIFASGSFLEKDKVR
ADNVSYVKKEIDKKHKIFIEETLSSFSISNDLLKQYFDCYNELKAFKKDC
KSDEEEVKKTALRNKCTSIQRAMREAISQAFLKSPQKKLLAIKNLIENVF
KADENVQHFSEFTSYFSGFETNRENFYSDEEKSTSIAYRLVHDNLPIFIK
NIYIFEKLKEQFDAKTLSEIFENYKLYVAGSSLDEVFSLEYFNNTLTQKG
IDNYNAVIGKIVKEDKQEIQGLNEHINLYNQKHKDRRLPFFISLKKQILS
DREALSWLPDMFKNDSEVIKALKGFYIEDGFENNVLTPLATLLSSLDKYN
LNGIFIRNNEALSSLSQNVYRNFSIDEAIDANAELQTFNNYELIANALRA
KIKKETKQGRKSFEKYEEYIDKKVKAIDSLSIQEINELVENYVSEFNSNS
GNMPRKVEDYFSLMRKGDFGSNDLIENIKTKLSAAEKLLGTKYQETAKDI
FKKDENSKLIKELLDATKQFQHFIKPLLGTGEEADRDLVFYGDFLPLYEK
FEELTLLYNKVRNRLTQKPYSKDKIRLCFNKPKLMTGWVDSKTEKSDNGT
QYGGYLFRKKNEIGEYDYFLGISSKAQLFRKNEAVIGDYERLDYYQPKAN
TIYGSAYEGENSYKEDKKRLNKVIIAYIEQIKQTNIKKSIIESISKYPNI
SDDDKVTPSSLLEKIKKVSIDSYNGILSFKSFQSVNKEVIDNLLKTISPL
KNKAEFLDLINKDYQIFTEVQAVIDEICKQKTFIYFPISNVELEKEMGDK
DKPLCLFQISNKDLSFAKTFSANLRKKRGAENLHTMLFKALMEGNQDNLD
LGSGAIFYRAKSLDGNKPTHPANEAIKCRNVANKDKVSLFTYDIYKNRRY
MENKFLFHLSIVQNYKAANDSAQLNSSATEYIRKADDLHIIGIDRGERNL
LYYSVIDMKGNIVEQDSLNIIRNNDLETDYHDLLDKREKERKANRQNWEA
VEGIKDLKKGYLSQAVHQIAQLMLKYNAIIALEDLGQMFVTRGQKIEKAV
YQQFEKSLVDKLSYLVDKKRPYNELGGILKAYQLASSITKNNSDKQNGFL
FYVPAWNTSKIDPVTGFTDLLRPKAMTIKEAQDFFGAFDNISYNDKGYFE
FETNYDKFKIRMKSAQTRWTICTFGNRIKRKKDKNYWNYEEVELTEEFKK
LFKDSNIDYENCNLKEEIQNKDNRKFFDDLIKLLQLTLQMRNSDDKGNDY
IISPVANAEGQFFDSRNGDKKLPLDADANGAYNIARKGLWNIRQIKQTKN
DKKLNLSISSTEWLDFVREKPYLK
>CCB70584_(modified) Protein of unknown function
[Flavobacterium branchiophilum FL-15]
(SEQ ID NO: 75)
MTNKFTNQYSLSKTLRFELIPQGKTLEFIQEKGLLSQDKQRAESYQEM
KKTIDKFHKYFIDLALSNAKLTHLETYLELYNKSAETKKEQKFKDDLKK
VQDNLRKEIVKSFSDGDAKSIFAILDKKELITVELEKWFENNEQKDIYF
DEKFKTFTTYFTGFHQNRKNMYSVEPNSTAIAYRLIHENLPKFLENAKA
FEKIKQVESLQVNFRELMGEFGDEGLIFVNELEEMFQINYYNDVLSQNG
ITIYNSIISGFTKNDIKYKGLNEYINNYNQTKDKKDRLPKLKQLYKQIL
SDRISLSFLPDAFTDGKQVLKAIFDFYKINLLSYTIEGQEESQNLLLLI
RQTIENLSSFDTQKIYLKNDTHLTTISQQVFGDFSVFSTALNYWYETKV
NPKFETEYSKANEKKREILDKAKAVFTKQDYFSIAFLQEVLSEYILTLD
HTSDIVKKHSSNCIADYFKNHFVAKKENETDKTFDFIANITAKYQCIQG
ILENADQYEDELKQDQKLIDNLKFFLDAILELLHFIKPLHLKSESITEK
DTAFYDVFENYYEALSLLTPLYNMVRNYVTQKPYSTEKIKLNFENAQLL
NGWDANKEGDYLTTILKKDGNYFLAIMDKKHNKAFQKFPEGKENYEKMV
YKLLPGVNKMLPKVFFSNKNIAYFNPSKELLENYKKETHKKGDTFNLEH
CHTLIDFFKDSLNKHEDWKYFDFQFSETKSYQDLSGFYREVEHQGYKIN
FKNIDSEYIDGLVNEGKLFLFQIYSKDFSPFSKGKPNMHTLYWKALFEE
QNLQNVIYKLNGQAEIFFRKASIKPKNIILHKKKIKIAKKHFIDKKTKT
SEIVPVQTIKNLNMYYQGKISEKELTQDDLRYIDNFSIFNEKNKTIDII
KDKRFTVDKFQFHVPITMNFKATGGSYINQTVLEYLQNNPEVKIIGLDR
GERHLVYLTLIDQQGNILKQESLNTITDSKISTPYHKLLDNKENERDLA
RKNWGTVENIKELKEGYISQVVHKIATLMLEENAIVVMEDLNFGFKRGR
FKVEKQIYQKLEKMLIDKLNYLVLKDKQPQELGGLYNALQLTNKFESFQ
KMGKQSGFLFYVPAWNTSKIDPTTGFVNYFYTKYENVDKAKAFFEKFEA
IRFNAEKKYFEFEVKKYSDFNPKAEGTQQAWTICTYGERIETKRQKDQN
NKFVSTPINLTEKIEDFLGKNQIVYGDGNCIKSQIASKDDKAFFETLLY
WFKMTLQMRNSETRTDIDYLISPVMNDNGTFYNSRDYEKLENPTLPKDA
DANGAYHIAKKGLMLLNKIDQADLTKKVDLSISNRDWLQFVQKNK
>WP_005398606_(modified) hypothetical protein
[Helcococcus kunzii]
(SEQ ID NO: 76)
MFEKLSNIVSISKTIRFKLIPVGKTLENIEKLGKLEKDFERSDFYPILKN
ISDDYYRQYIKEKLSDLNLDWQKLYDAHELLDSSKKESQKNLEMIQAQYR
KVLFNILSGELDKSGEKNSKDLIKNNKALYGKLFKKQFILEVLPDFVNNN
DSYSEEDLEGLNLYSKFTTRLKNFWETRKNVFTDKDIVTAIPFRAVNENF
GFYYDNIKIFNKNIEYLENKIPNLENELKEADILDDNRSVKDYFTPNGFN
YVITQDGIDVYQAIRGGFTKENGEKVQGINEILNLTQQQLRRKPETKNVK
LGVLTKLRKQILEYSESTSFLIDQIEDDNDLVDRINKFNVSFFESTEVSP
SLFEQIERLYNALKSIKKEEVYIDARNTQKFSQMLFGQWDVIRRGYTVKI
TEGSKEEKKKYKEYLELDETSKAKRYLNIREIEELVNLVEGFEEVDVFSV
LLEKFKMNNIERSEFEAPIYGSPIKLEAIKEYLEKHLEEYHKWKLLLIGN
DDLDTDETFYPLLNEVISDYYIIPLYNLTRNYLTRKHSDKDKIKVNFDFP
TLADGWSESKISDNRSIILRKGGYYYLGILIDNKLLINKKNKSKKIYEIL
IYNQIPEFSKSIPNYPFTKKVKEHFKNNVSDFQLIDGYVSPLIITKEIYD
IKKEKKYKKDFYKDNNTNKNYLYTIYKWIEFCKQFLYKYKGPNKESYKEM
YDFSTLKDTSLYVNLNDFYADVNSCAYRVLFNKIDENTIDNAVEDGKLLL
FQIYNKDFSPESKGKKNLHTLYWLSMFSEENLRTRKLKLNGQAEIFYRKK
LEKKPIIHKEGSILLNKIDKEGNTIPENIYHECYRYLNKKIGREDLSDEA
IALFNKDVLKYKEARFDIIKDRRYSESQFFFHVPITFNWDIKTNKNVNQI
VQGMIKDGEIKHIIGIDRGERHLLYYSVIDLEGNIVEQGSLNTLEQNRFD
NSTVKVDYQNKLRTREEDRDRARKNWTNINKIKELKDGYLSHVVHKLSRL
IIKYEAIVIMENLNQGFKRGRFKVERQVYQKFELALMNKLSALSFKEKYD
ERKNLEPSGILNPIQACYPVDAYQELQGQNGIVFYLPAAYTSVIDPVTGF
TNLFRLKSINSSKYEEFIKKFKNIYFDNEEEDFKFIFNYKDFAKANLVIL
NNIKSKDWKISTRGERISYNSKKKEYFYVQPTEFLINKLKELNIDYENID
IIPLIDNLEEKAKRKILKALFDTFKYSVQLRNYDFENDYIISPTADDNGN
YYNSNEIDIDKTNLPNNGDANGAFNIARKGLLLKDRIVNSNESKVDLKIK
NEDWINFIIS
>WP_021736722_(modified) CRISPR-associated protein
Cpfl, subtype PREFRAN [Acidaminococcus sp. BV3L6]
(SEQ ID NO: 77)
MTQFEGFTNLYQVSKTLRFELIPQGKTLKHIQEQGFIEEDKARNDHYK
ELKPIIDRIYKTYADQCLQLVQLDWENLSAAIDSYRKEKTEETRNALIEE
QATYRNAIHDYFIGRTDNLTDAINKRHAEIYKGLFKAELFNGKVLKQLGT
VTTTEHENALLRSFDKFTTYFSGFYENRKNVFSAEDISTAIPHRIVQDNF
PKFKENCHIFTRLITAVPSLREHFENVKKAIGIFVSTSIEEVFSFPFYNQ
LLTQTQIDLYNQLLGGISREAGTEKIKGLNEVLNLAIQKNDETAHIIASL
PHRFIPLFKQILSDRNTLSFILEEFKSDEEVIQSFCKYKTLLRNENVLET
AEALFNELNSIDLTHIFISHKKLETISSALCDHWDTLRNALYERRISELT
GKITKSAKEKVQRSLKHEDINLQEIISAAGKELSEAFKQKTSEILSHAHA
ALDQPLPTTLKKQEEKEILKSQLDSLLGLYHLLDWFAVDESNEVDPEFSA
RLTGIKLEMEPSLSFYNKARNYATKKPYSVEKFKLNFQMPTLASGWDVNK
EKNNGAILFVKNGLYYLGIMPKQKGRYKALSFEPTEKTSEGFDKMYYDYF
PDAAKMIPKCSTQLKAVTAHFQTHTTPILLSNNFIEPLEITKEIYDLNNP
EKEPKKFQTAYAKKTGDQKGYREALCKWIDFTRDFLSKYTKTTSIDLSSL
RPSSQYKDLGEYYAELNPLLYHISFQRIAEKEIMDAVETGKLYLFQIYNK
DFAKGHHGKPNLHTLYWTGLFSPENLAKTSIKLNGQAELFYRPKSRMKRM
AHRLGEKMLNKKLKDQKTPIPDTLYQELYDYVNHRLSHDLSDEARALLPN
VITKEVSHEIIKDRRFTSDKFFFHVPITLNYQAANSPSKFNQRVNAYLKE
HPETPIIGIDRGERNLIYITVIDSTGKILEQRSLNTIQQFDYQKKLDNRE
KERVAARQAWSVVGTIKDLKQGYLSQVIHEIVDLMIHYQAVVVLENLNFG
FKSKRTGIAEKAVYQQFEKMLIDKLNCLVLKDYPAEKVGGVLNPYQLTDQ
FTSFAKMGTQSGFLFYVPAPYTSKIDPLTGFVDPFVWKTIKNHESRKHFL
EGFDFLHYDVKTGDFILHFKMNRNLSFQRGLPGFMPAWDIVFEKNETQFD
AKGTPFIAGKRIVPVIENHRFTGRYRDLYPANELIALLEEKGIVFRDGSN
ILPKLLENDDSHAIDTMVALIRSVLQMRNSNAATGEDYINSPVRDLNGVC
FDSRFQNPEWPMDADANGAYHIALKGQLLLNHLKESKDLKLQNGISNQDW
LAYIQELRN
>WP_004339290_(modified) hypothetical protein
[Francisella tularensis]
(SEQ ID NO: 78)
MSIYQEFVNKYSLSKTLRFELIPQGKTLENIKARGLILDDEKRAKDYKK
AKQIIDKYHQFFIEEILSSVCISEDLLQNYSDVYFKLKKSDDDNLQKDFK
SAKDTIKKQISKYINDSEKFKNLFNQNLIDAKKGQESDLILWLKQSKDNG
IELFKANSDITDIDEALEIIKSFKGWTTYFKGFHENRKNVYSSNDIPTSI
IYRIVDDNLPKFLENKAKYESLKDKAPEAINYEQIKKDLAEELTFDIDYK
TSEVNQRVFSLDEVFEIANFNNYLNQSGITKFNTIIGGKFVNGENTKRKG
INEYINLYSQQINDKTLKKYKMSVLFKQILSDTESKSFVIDKLEDDSDVV
TTMQSFYEQIAAFKTVEEKSIKETLSLLFDDLKAQKLDLSKIYFKNDKSL
TDLSQQVFDDYSVIGTAVLEYITQQVAPKNLDNPSKKEQDLIAKKTEKAK
YLSLETIKLALEEFNKHRDIDKQCRFEEILSNFAAIPMIFDEIAQNKDNL
AQISIKYQNQGKKDLLQASAEEDVKAIKDLLDQTNNLLHRLKIFHISQSE
DKANILDKDEHFYLVFEECYFELANIVPLYNKIRNYITQKPYSDEKFKLN
FENSTLASGWDKNKESANTAILFIKDDKYYLGIMDKKHNKIFSDKAIEEN
KGEGYKKIVYKQIADASKDIQNLMIIDGKTVCKKGRKDRNGVNRQLLSLK
RKHLPENIYRIKETKSYLKNEARFSRKDLYDFIDYYKDRLDYYDFEFELK
PSNEYSDFNDFTNHIGSQGYKLTFENISQDYINSLVNEGKLYLFQIYSKD
FSAYSKGRPNLHTLYWKALFDERNLQDVVYKLNGEAELFYRKQSIPKKIT
HPAKETIANKNKDNPKKESVFEYDLIKDKRFTEDKFFFHCPITINFKSSG
ANKFNDEINLLLKEKANDVHILSIDRGERHLAYYTLVDGKGNIIKQDNFN
IIGNDRMKTNYHDKLAAIEKDRDSARKDWKKINNIKEMKEGYLSQVVHEI
AKLVIEYNAIVVFEDLNFGFKRGRFKVEKQVYQKLEKMLIEKLNYLVFKD
NEFDKTGGVLRAYQLTAPFETFKKMGKQTGIIYYVPAGFTSKICPVTGFV
NQLYPKYESVSKSQEFFSKFDKICYNLDKGYFEFSFDYKNFGDKAAKGKW
TIASFGSRLINFRNSDKNHNWDTREVYPTKELEKLLKDYSIEYGHGECIK
AAICGESDKKFFAKLTSVLNTILQMRNSKTGTELDYLISPVADVNGNFFD
SRQAPKNMPQDADANGAYHIGLKGLMLLDRIKNNQEGKKLNLVIKNEEYF
EFVQNRNN
>WP_022501477_(modified) hypothetical protein
[Eubacterium sp. CAG:76]
(SEQ ID NO: 79)
MNKAADNYTGGNYDEFIALSKVQKTLRNELKPTPFTAEHIKQRGIISE
DEYRAQQSLELKKIADEYYRNYITHKLNDINNLDFYNLFDAIEEKYKKND
KDNRDKLDLVEKSKRGEIAKMLSADDNFKSMFEAKLITKLLPDYVERNYT
GEDKEKALETLALFKGFTTYFKGYFKTRKNMFSGEGGASSICHRIVNVNA
SIFYDNLKTFMRIQEKAGDEIALIEEELTEKLDGWRLEHIFSRDYYNEVL
AQKGIDYYNQICGDINKHMNLYCQQNKFKANIFKMMKIQKQIMGISEKAF
EIPPMYQNDEEVYASFNEFISRLEEVKLTDRLINILQNINIYNTAKIYIN
ARYYTNVSSYVYGGWGVIDSAIERYLYNTIAGKGQSKVKKIENAKKDNKF
MSVKELDSIVAEYEPDYFNAPYIDDDDNAVKAFGGQGVLGYFNKMSELLA
DVSLYTIDYNSDDSLIENKESALRIKKQLDDIMSLYHWLQTFIIDEVVEK
DNAFYAELEDICCELENVVTLYDRIRNYVTKKPYSTQKFKLNFASPTLAA
GWSRSKEFDNNAIILLRNNKYYIAIFNVNNKPDKQIIKGSEEQRLSTDYK
KMVYNLLPGPNKMLPKVFIKSDTGKRDYNPSSYILEGYEKNRHIKSSGNF
DINYCHDLIDYYKACINKHPEWKNYGFKFKETNQYNDIGQFYKDVEKQGY
SISWAYISEEDINKLDEEGKIYLFEIYNKDLSAHSTGRDNLHTMYLKNIF
SEDNLKNICIELNGEAELFYRKSSMKSNITHKKDTILVNKTYINETGVRV
SLSDEDYMKVYNYYNNNYVIDTENDKNLIDIIEKIGHRKSKIDIVKDKRY
TEDKYFLYLPITINYGIEDENVNSKILEYIAKQDNMNVIGIDRGERNLIY
ISVIDNKGNIIEQKSFNLVNNYDYKNKLKNMEKTRDNARKNWQEIGKIKD
VKSGYLSGVISKIARMVIDYNAIIVMEDLNKGFKRGRFKVERQVYQKFEN
MLISKLNYLVFKERKADENGGILRGYQLTYIPKSIKNVGKQCGCIFYVPA
AYTSKIDPATGFINIFDFKKYSGSGINAKVKDKKEFLMSMNSIRYINECS
EEYEKIGHRELFAFSFDYNNFKTYNVSSPVNEWTAYTYGERIKKLYKDGR
WLRSEVLNLTENLIKLMEQYNIEYKDGHDIREDISHMDETRNADFICSLF
EELKYTVQLRNSKSEAEDENYDRLVSPILNSSNGFYDSSDYMENENNTTH
TNIPKDADANGAYCIALKGLYEINKIKQNWSDDKKFKENELYINVTEWLD
YIQNRRFE
>WP_014550095_(modified) hypothetical protein
[Francisella tularensis]
(SEQ ID NO: 80)
MSIYQEFVNKYSLSKTLRFELIPQGKTLENIKARGLILDDEKRAKDYKK
AKQIIDKYHQFFIEEILSSVCISEDLLQNYSDVYFKLKKSDDDNLQKDFK
SAKDTIKKQISEYIKDSEKFKNLFNQNLIDAKKGQESDLILWLKQSKDNG
IELFKANSDITDIDEALEIIKSFKGWTTYFKGFHENRKNVYSSNDIPTSI
TYRIVDDNLPKFLENKAKYESLKDKAPEAINYEQIKKDLAEELTFDIDYK
TSEVNQRVFSLDEVFEIANFNNYLNQSGITKFNTIIGGKFVNGENTKRKG
INEYINLYSQQINDKTLKKYKMSVLFKQILSDTESKSFVIDKLEDDSDVV
TTMQSFYEQIAAFKTVEEKSIKETLSLLFDDLKAQKLDLSKIYFKNDKSL
TDLSQQVFDDYSVIGTAVLEYITQQVAPKNLDNPSKKEQDLIAKKTEKAK
YLSLETIKLALEEFNKHRDIDKQCRFEEILANFAAIPMIFDEIAQNKDNL
AQISIKYQNQGKKDLLQASAEDDVKAIKDLLDQTNNLLHRLKIFHISQSE
DKANILDKDEHFYLVFEECYFELANIVPLYNKIRNYITQKPYSDEKFKLN
FENSTLANGWDKNKEPDNTAILFIKDDKYYLGVMNKKNNKIFDDKAIKEN
KGEGYKKIVYKLLPGANKMLPKVFFSAKSIKFYNPSEDILRIRNHSTHTK
NGNPQKGYEKFEFNIEDCRKFIDFYKESISKHPEWKDFGFRFSDTQRYNS
IDEFYREVENQGYKLTFENISESYIDSVVNQGKLYLFQIYNKDFSAYSKG
RPNLHTLYWKALFDERNLQDVVYKLNGEAELFYRKKSIPKKITHPAKEAI
ANKNKDNPKKESFFEYDLIKDKRFTEDKFFFHCPITINFKSSGANKFNDE
INLLLKEKANDVHILSIDRGERHLAYYTLVDGKGNIIKQDTFNIIGNDRM
KTNYHDKLAAIEKDRDSARKDWKKINNIKEMKEGYLSQVVHEIAKLVIEH
NAIVVFEDLNFGFKRGRFKVEKQVYQKLEKMLIEKLNYLVFKDNEFDKTG
GVLRAYQLTAPFETFKKMGKQTGIIYYVPAGFTSKICPVTGFVNQLYPKY
ESVSKSQEFFSKFDKICYNLDKGYFEFSFDYKNFGDKAAKGKWTIASFGS
RLINFRNSDKNHNWDTREVYPTKELEKLLKDYSIEYGHGECIKAAICGES
DKKFFAKLTSILNTILQMRNSKTGTELDYLISPVADVNGNFFDSRQAPKN
MPQDADANGAYHIGLKGLMLLDRIKNNQEGKKLNLVIKNEEYFEFVQNRN
N
>WP_003034647_(modified) hypothetical protein
[Francisella tularensis]
(SEQ ID NO: 81)
MSIYQEFVNKYSLSKTLRFELIPQGKTLENIKARGLILDDEKRAKDYKKA
KQIIDKYHQFFIEEILSSVCISEDLLQNYSDVYFKLKKSDDDNLQKDFKS
AKDTIKKQISEYIKDSEKFKNLFNQNLIDAKKGQESDLILWLKQSKDNGI
ELFKANSDITDIDEALEIIKSFKGWTTYFKGFHENRKNVYSSDDIPTSIT
YRIVDDNLPKFLENKAKYESLKDKAPEAINYEQIKKDLAEELTFDIDYKT
SEVNQRVFSLDEVFEIANFNNYLNQSGITKFNTIIGGKFVNGENTKRKGI
NEYINLYSQQINDKTLKKYKMSVLFKQILSDTESKSFVIDKLEDDSDVVT
TMQSFYEQIAAFKTVEEKSIKETLSLLFDDLKAQKLDLSKIYFKNDKSLT
DLSQQVFDDYSVIGTAVLEYITQQVAPKNLDNPSKKEQDLIAKKTEKAKY
LSLETIKLALEEFNKHRDIDKQCRFEEILANFAAIPMIFDEIAQNKDNLA
QISLKYQNQGKKDLLQASAEEDVKAIKDLLDQTNNLLHRLKIFHISQSED
KANILDKDEHFYLVFEECYFELANIVPLYNKIRNYITQKPYSDEKFKLNF
ENSTLANGWDKNKEPDNTAILFIKDDKYYLGVMNKKNNKIFDDKAIKENK
GEGYKKIVYKLLPGANKMLPKVFFSAKSIKFYNPSEDILRIRNHSTHTKN
GNPQKGYEKFEFNIEDCRKFIDFYKESISKHPEWKDFGFRFSDTQRYNSI
DEFYREVENQGYKLTFENISESYIDSVVNQGKLYLFQIYNKDFSAYSKGR
PNLHTLYWKALFDERNLQDVVYKLNGEAELFYRKQSIPKKITHPAKEAIA
NKNKDNPKKESVFEYDLIKDKRFTEDKFFFHCPITINFKSSGANKFNDEI
NLLLKEKANDVHILSIDRGERHLAYYTLVDGKGNIIKQDTFNIIGNDRMK
TNYHDKLAAIEKDRDSARKDWKKINNIKEMKEGYLSQVVHEIAKLVIEHN
AIVVFEDLNFGFKRGRFKVEKQVYQKLEKMLIEKLNYLVFKDNEFDKTGG
VLRAYQLTAPFETFKKMGKQTGIIYYVPAGFTSKICPVTGFVNQLYPKYE
SVSKSQEFFSKFDKICYNLDKGYFEFSFDYKNFGDKAAKGKWTIASFGSR
LINFRNSDKNFINWDTREVYPTKELEKLLKDYSIEYGHGECIKAAICGES
DKKFFAKLTSVLNTILQMRNSKTGTELDYLISPVADVNGNFFDSRQAPKN
MPQDADANGAYHIGLKGLMLLDRIKNNQEGKKLNLVIKNEEYFEFVQNRN
N
>FnCpf1 Francisella tularensis subsp. novicida
U112, complete genome
(SEQ ID NO: 82)
MSIYQEFVNKYSLSKTLRFELIPQGKTLENIKARGLILDDEKRAKDYKK
AKQIIDKYHQFFIEEILSSVCISEDLLQNYSDVYFKLKKSDDDNLQKDFK
SAKDTIKKQISEYIKDSEKFKNLFNQNLIDAKKGQESDLILWLKQSKDNG
IELFKANSDITDIDEALEIIKSFKGWTTYFKGFHENRKNVYSSNDIPTSI
IYRIVDDNLPKFLENKAKYESLKDKAPEAINYEQIKKDLAEELTFDIDYK
TSEVNQRVFSLDEVFEIANFNNYLNQSGITKFNTIIGGKFVNGENTKRKG
INEYINLYSQQINDKTLKKYKMSVLFKQILSDTESKSFVIDKLEDDSDVV
TTMQSFYEQIAAFKTVEEKSIKETLSLLFDDLKAQKLDLSKIYFKNDKSL
TDLSQQVFDDYSVIGTAVLEYITQQIAPKNLDNPSKKEQELIAKKTEKAK
YLSLETIKLALEEFNKHRDIDKQCRFEEILANFAAIPMIFDEIAQNKDNL
AQISIKYQNQGKKDLLQASAEDDVKAIKDLLDQTNNLLHKLKIFHISQSE
DKANILDKDEHFYLVFEECYFELANIVPLYNKIRNYITQKPYSDEKFKLN
FENSTLANGWDKNKEPDNTAILFIKDDKYYLGVMNKKNNKIFDDKAIKEN
KGEGYKKIVYKLLPGANKMLPKVFFSAKSIKFYNPSEDILRIRNHSTHTK
NGSPQKGYEKFEFNIEDCRKFIDFYKQSISKHPEWKDFGFRFSDTQRYNS
IDEFYREVENQGYKLTFENISESYIDSVVNQGKLYLFQIYNKDFSAYSKG
RPNLHTLYWKALFDERNLQDVVYKLNGEAELFYRKQSIPKKITHPAKEAI
ANKNKDNPKKESVFEYDLIKDKRFTEDKFFFHCPITINFKSSGANKFNDE
INLLLKEKANDVHILSIDRGERHLAYYTLVDGKGNIIKQDTFNIIGNDRM
KTNYHDKLAAIEKDRDSARKDWKKINNIKEMKEGYLSQVVHEIAKLVIEY
NAIVVFEDLNFGFKRGRFKVEKQVYQKLEKMLIEKLNYLVFKDNEFDKTG
GVLRAYQLTAPFETFKKMGKQTGIIYYVPAGFTSKICPVTGFVNQLYPKY
ESVSKSQEFFSKFDKICYNLDKGYFEFSFDYKNFGDKAAKGKWTIASFGS
RLINFRNSDKNHNWDTREVYPTKELEKLLKDYSIEYGHGECIKAAICGES
DKKFFAKLTSVLNTILQMRNSKTGTELDYLISPVADVNGNFFDSRQAPKN
MPQDADANGAYHIGLKGLMLLGRIKNNQEGKKLNLVIKNEEYFEFVQNRN
N
>KKQ38174_(modified) hypothetical protein US54_
C0016G0015 [Microgenomates (Roizmanbacteria)
bacterium GW2011_GWA2_37_7]
(SEQ ID NO: 83)
MKSFDSFTNLYSLSKTLKFEMRPVGNTQKMLDNAGVFEKDKLIQKKY
GKTKPYFDRLHREFIEEALTGVELIGLDENFRTLVDWQKDKKNNVAMKAY
ENSLQRLRTEIGKIFNLKAEDWVKNKYPILGLKNKNTDILFEEAVFGILK
ARYGEEKDTFIEVEEIDKTGKSKINQISIFDSWKGFTGYFKKFFETRKNF
YKNDGTSTAIATRIIDQNLKRFIDNLSIVESVRQKVDLAETEKSFSISLS
QFFSIDFYNKCLLQDGIDYYNKIIGGETLKNGEKLIGLNELINQYRQNNK
DQKIPFFKLLDKQILSEKILFLDEIKNDTELTEALSQFAKTAEEKTKIVK
KLFADFVENNSKYDLAQIYISQEAFNTISNKWTSETETFAKYLFEAMKSG
KLAKYEKKDNSYKFPDFIALSQMKSALLSISLEGHFWKEKYYKISKFQEK
TNWEQFLAIFLYEFNSLFSDKINTKDGETKQVGYYLFAKDLHNLILSEQI
DIPKDSKVTIKDFADSVLTIYQMAKYFAVEKKRAWLAEYELDSFYTQPDT
GYLQFYDNAYEDIVQVYNKLRNYLTKKPYSEEKWKLNFENSTLANGWDKN
KESDNSAVILQKGGKYYLGLITKGHNKIFDDRFQEKFIVGIEGGKYEKIV
YKFFPDQAKMFPKVCFSAKGLEFFRPSEEILRIYNNAEFKKGETYSIDSM
QKLIDFYKDCLTKYEGWACYTFRHLKPTEEYQNNIGEFFRDVAEDGYRID
FQGISDQYIHEKNEKGELHLFEIHNKDWNLDKARDGKSKTTQKNLHTLYF
ESLFSNDNVVQNFPIKLNGQAEIFYRPKTEKDKLESKKDKKGNKVIDHKR
YSENKIFFHVPLTLNRTKNDSYRFNAQINNFLANNKDINIIGVDRGEKHL
VYYSVITQASDILESGSLNELNGVNYAEKLGKKAENREQARRDWQDVQGI
KDLKKGYISQVVRKLADLAIKHNAIIILEDLNMRFKQVRGGIEKSIYQQL
EKALIDKLSFLVDKGEKNPEQAGHLLKAYQLSAPFETFQKMGKQTGIIFY
TQASYTSKSDPVTGWRPHLYLKYFSAKKAKDDIAKFTKIEFVNDRFELTY
DIKDFQQAKEYPNKTVWKVCSNVERFRWDKNLNQNKGGYTHYTNITENIQ
ELFTKYGIDITKDLLTQISTIDEKQNTSFFRDFIFYFNLICQIRNTDDSE
IAKKNGKDDFILSPVEPFFDSRKDNGNKLPENGDDNGAYNIARKGIVILN
KISQYSEKNENCEKMKWGDLYVSNIDWDNFVTQANARH
>WP_022097749_(modified) hypothetical protein
[Eubacterium eligens CAG: 72]
(SEQ ID NO: 84)
MNGNRSIVYREFVGVTPVAKTLRNELRPVGHTQEHIIQNGLIQEDELR
QEKSTELKNIMDDYYREYIDKSLSGLTDLDFTLLFELMNSVQSSLSKDNK
KALEKEHNKMREQICTHLQSDSDYKNMFNAKLFKEILPDFIKNYNQYDVK
DKAGKLETLALFNGFSTYFTDFFEKRKNVFTKEAVSTSIAYRIVHENSLI
FLANNITSYKKISEKALDEIEVIEKNNQDKMGDWELNQIFNPDFYNMVLI
QSGIDFYNEICGVVNAHIVINLYCQQTKNNYNLFKMRKLHKQILAYTSTS
FEVPKMFEDDMSVYNAVNAFIDETEKGNIIGKLKDIVNKYDELDEKRIYI
SKDFYETLSCFMSGNWNLITGCVENFYDENIHAKGKSKEEKVKKAVKEDK
YKSINDVNDLVEKYIDEKERNEFKNSNAKQYIREISNIITDTETAHLEYD
EHISLIESEEKADEIKKRLDMYMNMYHWVKAFIVDEVLDRDEMFYSDIDD
IYNILENIVPLYNRVRNYVTQKPYTSKKIKLNFQSPTLANGWSQSKEFDN
NAIILIRDNKYYLAIFNAKNKPDKKIIQGNSDKKNDNDYKKMVYNLLPGA
NKMLPKVFLSKKGIETFKPSDYIISGYNAHKHIKTSENFDISFCRDLIDY
FKNSIEKHAEWRKYEFKFSATDSYNDISEFYREVEMQGYRIDWTYISEAD
INKLDEEGKIYLFQIYNKDFAENSTGKENLHTMYFKNIFSEENLKNIVIK
LNGQAELFYRKASVKNPVKHKKDSVLVNKTYKNQLDNGDVVRIPIPDDIY
NEIYKMYNGYIKESDLSEAAKEYLDKVEVRTAQKDIVKDYRYTVDKYFIH
TPITINYKVTARNNVNDMAVKYIAQNDDIHVIGIDRGERNLIYISVIDSH
GNIVKQKSYNILNNYDYKKKLVEKEKTREYARKNWKSIGNIKELKEGYIS
GVVHEIAMLMVEYNAIIAMEDLNYGFKRGRFKVERQVYQKFESMLINKLN
YFASKGKSVDEPGGLLKGYQLTYVPDNIKNLGKQCGVIFYVPAAFTSKID
PSTGFISAFNFKSISTNASRKQFFMQFDEIRYCAEKDMFSFGFDYNNFDT
YNITMGKTQWTVYTNGERLQSEFNNARRTGKTKSINLTETIKLLLEDNEI
NYADGHDVRIDMEKMYEDKNSEFFAQLLSLYKLTVQMRNSYTEAEEQEKG
ISYDKIISPVINDEGEFFDSDNYKESDDKECKMPKDADANGAYCTALKGL
YEVLKIKSEWTEDGFDRNCLKLPHAEWLDFIQNKRYE
>WP_012739647_(modified) hypothetical protein
[[Eubacterium] eligens]
(SEQ ID NO: 85)
MNGNRSIVYREFVGVIPVAKTLRNELRPVGHTQEHIIQNGLIQEDELRQ
EKSTELKNIMDDYYREYIDKSLSGVTDLDFTLLFELMNLVQSSPSKDNKK
ALEKEQSKMREQICTHLQSDSNYKNIFNAKLLKEILPDFIKNYNQYDVKD
KAGKLETLALFNGFSTYFTDFFEKRKNVFTKEAVSTSIAYRIVHENSLIF
LANMTSYKKISEKALDEIEVIEKNNQDKMGDWELNQIFNPDFYNMVLIQS
GIDFYNEICGVVNAHMNLYCQQTKNNYNLFKMRKLHKQILAYTSTSFEVP
KMFEDDMSVYNAVNAFIDETEKGNIIGKLKDIVNKYDELDEKRIYISKDF
YETLSCFMSGNWNLITGCVENFYDENIHAKGKSKEEKVKKAVKEDKYKSI
NDVNDLVEKYIDEKERNEFKNSNAKQYIREISNIITDTETAHLEYDDHIS
LIESEEKADEMKKRLDMYMNMYHWAKAFIVDEVLDRDEMFYSDIDDIYNI
LENIVPLYNRVRNYVTQKPYNSKKIKLNFQSPTLANGWSQSKEFDNNAII
LIRDNKYYLAIFNAKNKPDKKIIQGNSDKKNDNDYKKMVYNLLPGANKML
PKVFLSKKGIETFKPSDYIISGYNAHKHIKTSENFDISFCRDLIDYFKNS
IEKHAEWRKYEFKFSATDSYSDISEFYREVEMQGYRIDWTYISEADINKL
DEEGKIYLFQIYNKDFAENSTGKENLHTMYFKNIFSEENLKDIIIKLNGQ
AELFYRRASVKNPVKHKKDSVLVNKTYKNQLDNGDVVRIPIPDDIYNEIY
KMYNGYIKESDLSEAAKEYLDKVEVRTAQKDIVKDYRYTVDKYFIHTPIT
INYKVTARNNVNDMVVKYIAQNDDIHVIGIDRGERNLIYISVIDSHGNIV
KQKSYNILNNYDYKKKLVEKEKTREYARKNWKSIGNIKELKEGYISGVVH
EIAMLIVEYNAIIAMEDLNYGFKRGRFKVERQVYQKFESMLINKLNYFAS
KEKSVDEPGGLLKGYQLTYVPDNIKNLGKQCGVIFYVPAAFTSKIDPSTG
FISAFNFKSISTNASRKQFFMQFDEIRYCAEKDMFSFGFDYNNFDTYNIT
MGKTQWTVYTNGERLQSEFNNARRTGKTKSINLTETIKLLLEDNEINYAD
GHDIRIDMEKMDEDKKSEFFAQLLSLYKLTVQMRNSYTEAEEQENGISYD
KIISPVINDEGEFFDSDNYKESDDKECKMPKDADANGAYCIALKGLYEVL
KIKSEWTEDGFDRNCLKLPHAEWLDFIQNKRYE
>WP_045971446_(modified) hypothetical protein
[Flavobacterium sp. 316]
(SEQ ID NO: 86)
MKNFSNLYQVSKTVRFELKPIGNTLENIKNKSLLKNDSIRAESYQKMK
KTIDEFHKYFIDLALNNKKLSYLNEYIALYTQSAEAKKEDKFKADFKKVQ
DNLRKEIVSSFTEGEAKAIFSVLDKKELITIELEKWKNENNLAVYLDESF
KSFTTYFTGFHQNRKNMYSAEANSTAIAYRLIHENLPKFIENSKAFEKSS
QIAELQPKIEKLYKEFEAYLNVNSISELFEIDYFNEVLTQKGITVYNNII
GGRTATEGKQKIQGLNEIINLYNQTKPKNERLPKLKQLYKQILSDRISLS
FLPDAFTEGKQVLKAVFEFYKINLLSYKQDGVEESQNLLELIQQVVKNLG
NQDVNKIYLKNDTSLTTIAQQLFGDFSVFSAALQYRYETVVNPKYTAEYQ
KANEAKQEKLDKEKIKFVKQDYFSIAFLQEVVADYVKTLDENLDWKQKYT
PSCIADYFTTHFIAKKENEADKTFNFIANIKAKYQCIQGILEQADDYEDE
LKQDQKLIDNIKFFLDAILEVVHFIKPLHLKSESITEKDNAFYDVFENYY
EALNVVTPLYNMVRNYVTQKPYSTEKIKLNFENAQLLNGWDANKEKDYLT
TILKRDGNYFLAIMDKKHNKTFQQFTEDDENYEKIVYKLLPGVNKMLPKV
FFSNKNIAFFNPSKEILDNYKNNTHKKGATFNLKDCHALIDFFKDSLNKH
EDWKYFDFQFSETKTYQDLSGFYKEVEHQGYKINFKKVSVSQIDTLIEEG
KMYLFQIYNKDFSPYAKGKPNMHTLYWKALFETQNLENVIYKLNGQAEIF
FRKASIKKKNIITHKAHQPIAAKNPLTPTAKNTFAYDLIKDKRYTVDKFQ
FHVPITMNFKATGNSYINQDVLAYLKDNPEVNIIGLDRGERHLVYLTLID
QKGTILLQESLNVIQDEKTHTPYHTLLDNKEIARDKARKNWGSIESIKEL
KEGYISQVVHKITKMMIEHNAIVVMEDLNFGFKRGRFKVEKQIYQKLEKM
LIDKLNYLVLKDKQPHELGGLYNALQLTNKFESFQKMGKQSGFLFYVPAW
NTSKIDPTTGFVNYFYTKYENVEKAKTFFSKFDSILYNKTKGYFEFVVKN
YSDFNPKAADTRQEWTICTHGERIETKRQKEQNNNFVSTTIQLTEQFVNF
FEKVGLDLSKELKTQLIAQNEKSFFEELFHLLKLTLQMRNSESHTEIDYL
ISPVANEKGIFYDSRKATASLPIDADANGAYHIAKKGLWIMEQINKTNSE
DDLKKVKLAISNREWLQYVQQVQKK
>WP_044110123_(modified) hypothetical protein
[Prevotella brevis]
(SEQ ID NO: 87)
MKQFTNLYQLSKTLRFELKPIGKTLEHINANGFIDNDAHRAESYKKVK
KLIDDYHKDYIENVLNNFKLNGEYLQAYFDLYSQDTKDKQFKDIQDKLRK
SIASALKGDDRYKTIDKKELIRQDMKTFLKKDTDKALLDEFYEFTTYFTG
YHENRKNMYSDEAKSTAIAYRLIHDNLPKFIDNIAVFKKIANTSVADNFS
TIYKNFEEYLNVNSIDEIFSLDYYNIVLTQTQIEVYNSIIGGRTLEDDTK
IQGINEFVNLYNQQLANKKDRLPKLKPLFKQILSDRVQLSWLQEEFNTGA
DVLNAVKEYCTSYFDNVEESVKVLLTGISDYDLSKIYITNDLALTDVSQR
MFGEWSIIPNAIEQRLRSDNPKKTNEKEEKYSDRISKLKKLPKSYSLGYI
NECISELNGIDIADYYATLGAINTESKQEPSIPTSIQVHYNALKPILDTD
YPREKNLSQDKLTVMQLKDLLDDFKALQHFIKPLLGNGDEAEKDEKFYGE
LMQLWEVIDSITPLYNKVRNYCTRKPFSTEKIKVNFENAQLLDGWDENKE
STNASIILRKNGMYYLGIMKKEYRNILTKPMPSDGDCYDKVVYKFFKDIT
TMVPKCTTQMKSVKEHFSNSNDDYTLFEKDKFIAPVVITKEIFDLNNVLY
NGVKKFQIGYLNNTGDSFGYNHAVEIWKSFCLKFLKAYKSTSIYDFSSIE
KNIGCYNDLNSFYGAVNLLLYNLTYRKVSVDYIHQLVDEDKMYLFMIYNK
DFSTYSKGTPNMHTLYWKMLFDESNLNDVVYKLNGQAEVFYRKKSITYQH
PTHPANKPIDNKNVNNPKKQSNFEYDLIKDKRYTVDKFMFHVPITLNFKG
MGNGDINMQVREYIKTTDDLHFIGIDRGERHLLYICVINGKGEIVEQYSL
NEIVNNYKGTEYKTDYHTLLSERDKKRKEERSSWQTIEGIKELKSGYLSQ
VIHKITQLMIKYNAIVLLEDLNMGFKRGRQKVESSVYQQFEKALIDKLNY
LVDKNKDANEIGGLLHAYQLTNDPKLPNKNSKQSGFLFYVPAWNTSKIDP
VTGFVNLLDTRYENVAKAQAFFKKFDSIRYNKEYDRFEFKFDYSNFTAKA
EDTRTQWTLCTYGTRIETFRNAEKNSNWDSREIDLTTEWKTLFTQHNIPL
NANLKEAILLQANKNFYTDILHLMKLTLQMRNSVTGTDIDYMVSPVANEC
GEFFDSRKVKEGLPVNADANGAYNIARKGLWLAQQIKNANDLSDVKLAIT
NKEWLQFAQKKQYLKD
>WP_036388671_(modified) hypothetical protein
[Moraxella caprae]
(SEQ ID NO: 88)
MLFQDFTHLYPLSKTMRFELKPIGKTLEHIHAKNFLSQDETMADMYQ
KVKAILDDYHRDFIADMMGEVKLTKLAEFYDVYLKFRKNPKDDGLQKQLK
DLQAVLRKEIVKPIGNGGKYKAGYDRLFGAKLFKDGKELGDLAKFVIAQE
GESSPKLAHLAHFEKFSTYFTGFHDNRKNMYSDEDKHTAITYRLIHENLP
RFIDNLQILATIKQKHSALYDQIINELTASGLDVSLASHLDGYHKLLTQE
GITAYNTLLGGISGEAGSRKIQGINELINSHENQHCHKSERIAKLRPLHK
QILSDGMGVSFLPSKFADDSEMCQAVNEFYRHYADVFAKVQSLFDGFDDH
QKDGIYVEHKNLNELSKQAFGDFALLGRVLDGYYVDVVNPEFNERFAKAK
TDNAKAKLTKEKDKFIKGVHSLASLEQAIEHYTARHDDESVQAGKLGQYF
KHGLAGVDNPIQKIHNNHSTIKGFLERERPAGERALPKIKSGKNPEMTQL
RQLKELLDNALNVAHFAKLLTTKTTLDNQDGNFYGEFGALYDELAKIPTL
YNKVRDYLSQKPFSTEKYKLNFGNPTLLNGWDLNKEKDNFGIILQKDGCY
YLALLDKAHKKVFDNAPNTGKNVYQKMIYKLLPGPNKMLPKVFFAKSNLD
YYNPSAELLDKYAQGTHKKGNNFNLKDCHALIDFFKAGINKHPEWQHFGF
KFSPTSSYQDLSDFYREVEPQGYQVKFVDINADYINELVEQGQLYLFQIY
NKDFSPKAHGKPNLHTLYFKALFSKDNLANPIYKLNGEAQIFYRKASLDM
NETTIHRAGEVLENKNPDNPKKRQFVYDIIKDKRYTQDKFMLHVPITMNF
GVQGMTIKEFNKKVNQSIQQYDEVNVIGIDRGERHLLYLTVINSKGEILE
QRSLNDITTASANGTQMTTPYHKILDKREIERLNARVGWGEIETIKELKS
GYLSHVVHQISQLMLKYNAIVVLEDLNFGFKRGRFKVEKQIYQNFENALI
KKLNHLVLKDEADDEIGSYKNALQLTNNFTDLKSIGKQTGFLFYVPAWNT
SKIDPETGFVDLLKPRYENIAQSQAFFGKFDKICYNADKDYFEFHIDYAK
FTDKAKNSRQIWKICSHGDKRYVYDKTANQNKGATKGINVNDELKSLFAR
HHINDKQPNLVMDICQNNDKEFHKSLIYLLKTLLALRYSNASSDEDFILS
PVANDEGMFFNSALADDTQPQNADANGAYHIALKGLWVLEQIKNSDDLNK
VKLAIDNQTWLNFAQNR
>WP_020988726_(modified) CRISPR-associated protein
Cpfl, subtype PREFRAN [Leptospira inadai]
(SEQ ID NO: 89)
MEDYSGFVNIYSIQKTLRFELKPVGKTLEHIEKKGFLKKDKIRAEDYK
AVKKIIDKYHRAYIEEVFDSVLHQKKKKDKTRFSTQFIKEIKEFSELYYK
TEKNIPDKERLEALSEKLRKMLVGAFKGEFSEEVAEKYKNLFSKELIRNE
IEKFCETDEERKQVSNFKSFTTYFTGFHSNRQNIYSDEKKSTAIGYRIIH
QNLPKFLDNLKIIESIQRRFKDFPWSDLKKNLKKIDKNIKLTEYFSIDGF
VNVLNQKGIDAYNTILGGKSEESGEKIQGLNEYINLYRQKNNIDRKNLPN
VKILFKQILGDRETKSFIPEAFPDDQSVLNSITEFAKYLKLDKKKKSIIA
ELKKFLSSFNRYELDGIYLANDNSLASISTFLFDDWSFIKKSVSFKYDES
VGDPKKKIKSPLKYEKEKEKWLKQKYYTISFLNDAIESYSKSQDEKRVKI
RLEAYFAEFKSKDDAKKQFDLLERIEEAYAIVEPLLGAEYPRDRNLKADK
KEVGKIKDFLDSIKSLQFFLKPLLSAEIFDEKDLGFYNQLEGYYEEIDSI
GHLYNKVRNYLTGKIYSKEKFKLNFENSTLLKGWDENREVANLCVIFRED
QKYYLGVMDKENNTILSDIPKVKPNELFYEKMVYKLIPTPHMQLPRIIFS
SDNLSIYNPSKSILKIREAKSFKEGKNFKLKDCHKFIDFYKESISKNEDW
SRFDFKFSKTSSYENISEFYREVERQGYNLDFKKVSKFYIDSLVEDGKLY
LFQIYNKDFSIFSKGKPNLHTIYFRSLFSKENLKDVCLKLNGEAEMFFRK
KSINYDEKKKREGHHPELFEKLKYPILKDKRYSEDKFQFHLPISLNFKSK
ERLNFNLKVNEFLKRNKDINIIGIDRGERNLLYLVMINQKGEILKQTLLD
SMQSGKGRPEINYKEKLQEKEIERDKARKSWGTVENIKELKEGYLSIVIH
QISKLMVENNAIVVLEDLNIGFKRGRQKVERQVYQKFEKMLIDKLNFLVF
KENKPTEPGGVLKAYQLTDEFQSFEKLSKQTGFLFYVPSWNTSKIDPRTG
FIDFLHPAYENIEKAKQWINKFDSIRFNSKMDWFEFTADTRKFSENLMLG
KNRVWVICTTNVERYFTSKTANSSIQYNSIQITEKLKELFVDIPFSNGQD
LKPEILRKNDAVFFKSLLFYIKTTLSLRQNNGKKGEEEKDFILSPVVDSK
GRFFNSLEASDDEPKDADANGAYHIALKGLMNLLVLNETKEENLSRPKWK
IKNKDWLEFVWERNR
>WP_023936172_(modified) exonuclease SbcC
[Porphyromonas crevioricanis]
(SEQ ID NO: 90)
MPWIDLKDFTNLYPVSKTLRFELKPVGKTLENIEKAGILKEDEHRAES
YRRVKKIIDTYHKVFIDSSLENMAKMGIENEIKAMLQSFCELYKKDHRTE
GEDKALDKIRAVLRGLIVGAFTGVCGRRENTVQNEKYESLFKEKLIKEIL
PDFVLSTEAESLPFSVEEATRSLKEFDSFTSYFAGFYENRKNIYSTKPQS
TAIAYRLIHENLPKFIDNILVFQKIKEPIAKELEHIRADFSAGGYIKKDE
RLEDIFSLNYYIHVLSQAGIEKYNALIGKIVTEGDGEMKGLNEHINLYNQ
QRGREDRLPLFRPLYKQILSDREQLSYLPESFEKDEELLRALKEFYDHIA
EDILGRTQQLMTSISEYDLSRIYVRNDSQLTDISKKMLGDWNAIYMARER
AYDHEQAPKRITAKYERDRIKALKGEESISLANLNSCIAFLDNVRDCRVD
TYLSTLGQKEGPHGLSNLVENVFASYHEAEQLLSFPYPEENNLIQDKDNV
VLIKNLLDNISDLQRFLKPLWGMGDEPDKDERFYGEYNYIRGALDQVIPL
YNKVRNYLTRKPYSTRKVKLNFGNSQLLSGWDRNKEKDNSCVILRKGQNF
YLAIMNNRHKRSFENKVLPEYKEGEPYFEKMDYKFLPDPNKMLPKVFLSK
KGIEIYEPSPKLLEQYGHGTHKKGDTFSMDDLHELIDFFKHSIEAHEDWK
QFGFKFSDTATYENVSSFYREVEDQGYKLSFRKVSESYVYSLIDQGKLYL
FQIYNKDFSPCSKGTPNLHTLYWRMLFDERNLADVIYKLDGKAEIFFREK
SLKNDHPTHPAGKPIKKKSRQKKGEESLFEYDLVKDRRYTMDKFQFHVPI
TMNFKCSAGSKVNDMVNAHIREAKDMHVIGIDRGERNLLYICVIDSRGTI
LDQISLNTINDIDYHDLLESRDKDRQQERRNWQTIEGIKELKQGYLSQAV
HRIAELMVAYKAVVALEDLNMGFKRGRQKVESSVYQQFEKQLIDKLNYLV
DKKKRPEDIGGLLRAYQFTAPFKSFKEMGKQNGFLFYIPAWNTSNIDPTT
GFVNLFHAQYENVDKAKSFFQKFDSISYNPKKDWFEFAFDYKNFTKKAEG
SRSMWILCTHGSRIKNFRNSQKNGQWDSEEFALTEAFKSLFVRYEIDYTA
DLKTAIVDEKQKDFFVDLLKLFKLTVQMRNSWKEKDLDYLISPVAGADGR
FFDTREGNKSLPKDADANGAYNIALKGLWALRQIRQTSEGGKLKLAISNK
EWLQFVQERSYEKD
>WP_009217842_(modified) hypothetical protein
[Bacteroidetes oral taxon 274]
(SEQ ID NO: 91)
MRKFNEFVGLYPISKTLRFELKPIGKTLEHIQRNKLLEHDAVRADDYV
KVKKIIDKYHKCLIDEALSGFTFDTEADGRSNNSLSEYYLYYNLKKRNEQ
EQKTFKTIQNNLRKQIVNKLTQSEKYKRIDKKELITTDLPDFLTNESEKE
LVEKFKNFTTYFTEFHKNRKNMYSKEEKSTAIAFRLINENLPKFVDNIAA
FEKVVSSPLAEKINALYEDFKEYLNVEEISRVFRLDYYDELLTQKQIDLY
NAIVGGRTEEDNKIQIKGLNQYINEYNQQQTDRSNRLPKLKPLYKQILSD
RESVSWLPPKFDSDKNLLIKIKECYDALSEKEKVFDKLESILKSLSTYDL
SKIYISNDSQLSYISQKMFGRWDIISKAIREDCAKRNPQKSRESLEKFAE
RIDKKLKTIDSISIGDVDECLAQLGETYVKRVEDYFVAMGESEIDDEQTD
TTSFKKNIEGAYESVKELLNNADNITDNNLMQDKGNVEKIKTLLDAIKDL
QRFIKPLLGKGDEADKDGVFYGEFTSLWTKLDQVTPLYNMVRNYLTSKPY
STKKIKLNFENSTLMDGWDLNKEPDNTTVIFCKDGLYYLGIMGKKYNRVF
VDREDLPHDGECYDKMEYKLLPGANKMLPKVFFSETGIQRFLPSEELLGK
YERGTHKKGAGFDLGDCRALIDFFKKSIERHDDWKKFDFKFSDTSTYQDI
SEFYREVEQQGYKMSFRKVSVDYIKSLVEEGKLYLFQIYNKDFSAHSKGT
PNMHTLYWKMLFDEENLKDVVYKLNGEAEVFFRKSSITVQSPTHPANSPI
KNKNKDNQKKESKFEYDLIKDRRYTVDKFLFHVPITMNFKSVGGSNINQL
VKRHIRSATDLHIIGIDRGERHLLYLTVIDSRGNIKEQFSLNEIVNEYNG
NTYRTDYHELLDTREGERTEARRNWQTIQNIRELKEGYLSQVIHKISELA
IKYNAVIVLEDLNFGFMRSRQKVEKQVYQKFEKMLIDKLNYLVDKKKPVA
ETGGLLRAYQLTGEFESFKTLGKQSGILFYVPAWNTSKIDPVTGFVNLFD
THYENIEKAKVFFDKFKSIRYNSDKDWFEFVVDDYTRFSPKAEGTRRDWT
ICTQGKRIQICRNHQRNNEWEGQEIDLTKAFKEHFEAYGVDISKDLREQI
NTQNKKEFFEELLRLLRLTLQMRNSMPSSDIDYLISPVANDTGCFFDSRK
QAELKENAVLPMNADANGAYNIARKGLLAIRKMKQEENDSAKISLAISNK
EWLKFAQTKPYLED
>WP_036890108_(modified) hypothetical protein
[Porphyromonas crevioricanis]
(SEQ ID NO: 92)
MDSLKDFTNLYPVSKTLRFELKPVGKTLENIEKAGILKEDEHRAESYR
RVKKIIDTYHKVFIDSSLENMAKMGIENEIKAMLQSFCELYKKDHRTEGE
DKALDKIRAVLRGLIVGAFTGVCGRRENTVQNEKYESLFKEKLIKEILPD
FVLSTEAESLPFSVEEATRSLKEFDSFTSYFAGFYENRKNIYSTKPQSTA
IAYRLIHENLPKFIDNILVFQKIKEPIAKELEHIRADFSAGGYIKKDERL
EDIFSLNYYIHVLSQAGIEKYNALIGKIVTEGDGEMKGLNEHINLYNQQR
GREDRLPLFRPLYKQILSDREQLSYLPESFEKDEELLRALKEFYDHIAED
ILGRTQQLMTSISEYDLSRIYVRNDSQLTDISKKMLGDWNAIYMARERAY
DHEQAPKRITAKYERDRIKALKGEESISLANLNSCIAFLDNVRDCRVDTY
LSTLGQKEGPHGLSNLVENVFASYHEAEQLLSFPYPEENNLIQDKDNVVL
IKNLLDNISDLQRFLKPLWGMGDEPDKDERFYGEYNYIRGALDQVIPLYN
KVRNYLTRKPYSTRKVKLNFGNSQLLSGWDRNKEKDNSCVILRKGQNFYL
AIMNNRHKRSFENKMLPEYKEGEPYFEKMDYKFLPDPNKMLPKVFLSKKG
IEIYKPSPKLLEQYGHGTHKKGDTFSMDDLHELIDFFKHSIEAHEDWKQF
GFKFSDTATYENVSSFYREVEDQGYKLSFRKVSESYVYSLIDQGKLYLFQ
IYNKDFSPCSKGTPNLHTLYWRMLFDERNLADVIYKLDGKAEIFFREKSL
KNDHPTHPAGKPIKKKSRQKKGEESLFEYDLVKDRRYTMDKFQFHVPITM
NFKCSAGSKVNDMVNAHIREAKDMHVIGIDRGERNLLYICVIDSRGTILD
QISLNTINDIDYHDLLESRDKDRQQEHRNWQTIEGIKELKQGYLSQAVHR
IAELMVAYKAVVALEDLNMGFKRGRQKVESSVYQQFEKQLIDKLNYLVDK
KKRPEDIGGLLRAYQFTAPFKSFKEMGKQNGFLFYIPAWNTSNIDPTTGF
VNLFHVQYENVDKAKSFFQKFDSISYNPKKDWFEFAFDYKNFTKKAEGSR
SMWILCTHGSRIKNFRNSQKNGQWDSEEFALTEAFKSLFVRYEIDYTADL
KTAIVDEKQKDFFVDLLKLFKLTVQMRNSWKEKDLDYLISPVAGADGRFF
DTREGNKSLPKDADANGAYNIALKGLWALRQIRQTSEGGKLKLAISNKEW
LQFVQERSYEKD
>WP_036887416_(modified) hypothetical protein
[Porphyromonas crevioricanis]
(SEQ ID NO: 93)
MDSLKDFTNLYPVSKTLRFELKPVGKTLENIEKAGILKEDEHRAESYR
RVKKIIDTYHKVFIDSSLENMAKMGIENEIKAMLQSFCELYKKDHRTEGE
DKALDKIRAVLRGLIVGAFTGVCGRRENTVQNEKYESLFKEKLIKEILPD
FVLSTEAESLPFSVEEATRSLKEFDSFTSYFAGFYENRKNIYSTKPQSTA
IAYRLIHENLPKFIDNILVFQKIKEPIAKELEHIRADFSAGGYIKKDERL
EDIFSLNYYIHVLSQAGIEKYNALIGKIVTEGDGEMKGLNEHINLYNQQR
GREDRLPLFRPLYKQILSDREQLSYLPESFEKDEELLRALKEFYDHIAED
ILGRTQQLMTSISEYDLSRIYVRNDSQLTDISKKMLGDWNAIYMARERAY
DHEQAPKRITAKYERDRIKALKGEESISLANLNSCIAFLDNVRDCRVDTY
LSTLGQKEGPHGLSNLVENVFASYHEAEQLLSFPYPEENNLIQDKDNVVL
IKNLLDNISDLQRFLKPLWGMGDEPDKDERFYGEYNYIRGALDQVIPLYN
KVRNYLTRKPYSTRKVKLNFGNSQLLSGWDRNKEKDNSCVILRKGQNFYL
AIMNNRHKRSFENKVLPEYKEGEPYFEKMDYKFLPDPNKMLPKVFLSKKG
IEIYKPSPKLLEQYGHGTHKKGDTFSMDDLHELIDFFKHSIEAHEDWKQF
GFKFSDTATYENVSSFYREVEDQGYKLSFRKVSESYVYSLIDQGKLYLFQ
IYNKDFSPCSKGTPNLHTLYWRMLFDERNLADVIYKLDGKAEIFFREKSL
KNDHPTHPAGKPIKKKSRQKKGEESLFEYDLVKDRHYTMDKFQFHVPITM
NFKCSAGSKVNDMVNAHIREAKDMHVIGIDRGERNLLYICVIDSRGTILD
QISLNTINDIDYHDLLESRDKDRQQERRNWQTIEGIKELKQGYLSQAVHR
IAELMVAYKAVVALEDLNMGFKRGRQKVESSVYQQFEKQLIDKLNYLVDK
KKRPEDIGGLLRAYQFTAPFKSFKEMGKQNGFLFYIPAWNTSNIDPTTGF
VNLFHAQYENVDKAKSFFQKFDSISYNPKKDWFEFAFDYKNFTKKAEGSR
SMWILCTHGSRIKNFRNSQKNGQWDSEEFALTEAFKSLFVRYEIDYTADL
KTAIVDEKQKDFFVDLLKLFKLTVQMRNSWKEKDLDYLISPVAGADGRFF
DTREGNKSLPKDADANGAYNIALKGLWALRQIRQTSEGGKLKLAISNKEW
LQFVQERSYEKD
>WP_023941260_(modified) exonuclease SbcC
[Porphyromonas cansulci]
(SEQ ID NO: 94)
MDSLKDFTNLYPVSKTLRFELKPVGKTLENIEKAGILKEDEHRAESYR
RVKKIIDTYHKVFIDSSLENMAKMGIENEIKAMLQSFCELYKKDHRTEGE
DKALDKIRAVLRGLIVGAFTGVCGRRENTVQNEKYESLFKEKLIKEILPD
FVLSTEAESLPFSVEEATRSLKEFDSFTSYFAGFYENRKNIYSTKPQSTA
IAYRLIHENLPKFIDNILVFQKIKEPIAKELEHIRADFSAGGYIKKDERL
EDIFSLNYYIHVLSQAGIEKYNALIGKIVTEGDGEMKGLNEHINLYNQQR
GREDRLPLFRPLYKQILSDREQLSYLPESFEKDEELLRALKEFYDHIAED
ILGRTQQLMTSISEYDLSRIYVRNDSQLTDISKKMLGDWNAIYMARERAY
DHEQAPKRITAKYERDRIKALKGEESISLANLNSCIAFLDNVRDCRVDTY
LSTLGQKEGPHGLSNLVENVFASYHEAEQLLSFPYPEENNLIQDKDNVVL
IKNLLDNISDLQRFLKPLWGMGDEPDKDERFYGEYNYIRGALDQVIPLYN
KVRNYLTRKPYSTRKVKLNFGNSQLLSGWDRNKEKDNSCVILRKGQNFYL
AIMNNRHKRSFENKVLPEYKEGEPYFEKMDYKFLPDPNKMLPKVFLSKKG
IEIYKPSPKLLEQYGHGTHKKGDTFSMDDLHELIDFFKHSIEAHEDWKQF
GFKFSDTATYENVSSFYREVEDQGYKLSFRKVSESYVYSLIDQGKLYLFQ
IYNKDFSPCSKGTPNLHTLYWRMLFDERNLADVIYKLDGKAEIFFREKSL
KNDHPTHPAGKPIKKKSRQKKGEESLFEYDLVKDRRYTMDKFQFHVPITM
NFKCSAGSKVNDMVNAHIREAKDMHVIGIDRGERNLLYICVIDSRGTILD
QISLNTINDIDYHDLLESRDKDRQQERRNWQTIEGIKELKQGYLSQAVHR
IAELMVAYKAVVALEDLNMGFKRGRQKVESSVYQQFEKQLIDKLNYLVDK
KKRPEDIGGLLRAYQFTAPFKSFKEMGKQNGFLFYIPAWNTSNIDPTTGF
VNLFHAQYENVDKAKSFFQKFDSISYNPKKDWFEFAFDYKNFTKKAEGSR
SMWILCTHGSRIKNFRNSQKNGQWDSEEFALTEAFKSLFVRYEIDYTADL
KTAIVDEKQKDFFVDLLKLFKLTVQMRNSWKEKDLDYLISPVAGADGRFF
DTREGNKSLPKDADANGAYNIALKGLWALRQIRQTSEGGKLKLAISNKEW
LQFVQERSYEKD
>WP_037975888_(modified) hypothetical protein
[Synergistes jonesii]
(SEQ ID NO: 95)
MANSLKDFTNIYQLSKTLRFELKPIGKTEEHINRKLIIMHDEKRGEDYK
SVTKLIDDYHRKFIHETLDPAHFDWNPLAEALIQSGSKNNKALPAEQKEM
REKIISMFTSQAVYKKLFKKELFSELLPEMIKSELVSDLEKQAQLDAVKS
FDKFSTYFTGFHENRKNIYSKKDTSTSIAFRIVHQNFPKFLANVRAYTLI
KERAPEVIDKAQKELSGILGGKTLDDIFSIESFNNVLTQDKIDYYNQIIG
GVSGKAGDKKLRGVNEFSNLYRQQHPEVASLRIKMVPLYKQILSDRTTLS
FVPEALKDDEQAINAVDGLRSELERNDIFNRIKRLFGKNNLYSLDKIWIK
NSSISAFSNELFKNWSFIEDALKEFKENEFNGARSAGKKAEKWLKSKYFS
FADIDAAVKSYSEQVSADISSAPSASYFAKFTNLIETAAENGRKFSYFAA
ESKAFRGDDGKTEIIKAYLDSLNDILHCLKPFETEDISDIDTEFYSAFAE
IYDSVKDVIPVYNAVRNYTTQKPFSTEKFKLNFENPALAKGWDKNKEQNN
TAIILMKDGKYYLGVIDKNNKLRADDLADDGSAYGYMKMNYKFIPTPHME
LPKVFLPKRAPKRYNPSREILLIKENKTFIKDKNFNRTDCHKLIDFFKDS
INKHKDWRTFGFDFSDTDSYEDISDFYMEVQDQGYKLTFTRLSAEKIDKW
VEEGRLFLFQIYNKDFADGAQGSPNLHTLYWKAIFSEENLKDVVLKLNGE
AELFFRRKSIDKPAVHAKGSMKVNRRDIDGNPIDEGTYVEICGYANGKRD
MASLNAGARGLIESGLVRITEVKHELVKDKRYTIDKYFFHVPFTINFKAQ
GQGNINSDVNLFLRNNKDVNIIGIDRGERNLVYVSLIDRDGHIKLQKDFN
IIGGMDYHAKLNQKEKERDTARKSWKTIGTIKELKEGYLSQVVHEIVRLA
VDNNAVIVMEDLNIGFKRGRFKVEKQVYQKFEKMLIDKLNYLVFKDAGYD
APCGILKGLQLTEKFESFTKLGKQCGIIFYIPAGYTSKIDPTTGFVNLFN
INDVSSKEKQKDFIGKLDSIRFDAKRDMFTFEFDYDKFRTYQTSYRKKWA
VWTNGKRIVREKDKDGKFRMNDRLLTEDMKNILNKYALAYKAGEDILPDV
ISRDKSLASEIFYVFKNTLQMRNSKRDTGEDFIISPVLNAKGRFFDSRKT
DAALPIDADANGAYHIALKGSLVLDAIDEKLKEDGRIDYKDMAVSNPKWF
EFMQTRKFDF
>EFI70750_(modified) conserved hypothetical
protein [Prevotella bryantii B14]
(SEQ ID NO: 96)
MQINNLKIIYMKFTDFTGLYSLSKTLRFELKPIGKTLENIKKAGLLEQD
QHRADSYKKVKKIIDEYHKAFIEKSLSNFELKYQSEDKLDSLEEYLMYYS
MKRIEKTEKDKFAKIQDNLRKQIADHLKGDESYKTIFSKDLIRKNLPDFV
KSDEERTLIKEFKDFTTYFKGFYENRENMYSAEDKSTAISHRIIHENLPK
FVDNINAFSKIILIPELREKLNQIYQDFEEYLNVESIDEIFHLDYFSMVM
TQKQIEVYNAIIGGKSTNDKKIQGLNEYINLYNQKHKDCKLPKLKLLFKQ
ILSDRIAISWLPDNFKDDQEALDSIDTCYKNLLNDGNVLGEGNLKLLLEN
IDTYNLKGIFIRNDLQLTDISQKMYASWNVIQDAVILDLKKQVSRKKKES
AEDYNDRLKKLYTSQESFSIQYLNDCLRAYGKTENIQDYFAKLGAVNNEH
EQTINLFAQVRNAYTSVQAILTTPYPENANLAQDKETVALIKNLLDSLKR
LQRFIKPLLGKGDESDKDERFYGDFTPLWETLNQITPLYNMVRNYMTRKP
YSQEKIKLNFENSTLLGGWDLNKEHDNTAIILRKNGLYYLAIMKKSANKI
FDKDKLDNSGDCYEKMVYKLLPGANKMLPKVFFSKSRIDEFKPSENIIEN
YKKGTHKKGANFNLADCHNLIDFFKSSISKHEDWSKFNFHFSDTSSYEDL
SDFYREVEQQGYSISFCDVSVEYINKMVEKGDLYLFQIYNKDFSEFSKGT
PNMHTLYWNSLFSKENLNNIIYKLNGQAEIFFRKKSLNYKRPTHPAHQAI
KNKNKCNEKKESIFDYDLVKDKRYTVDKFQFHVPITMNFKSTGNTNINQQ
VIDYLRTEDDTHIIGIDRGERHLLYLVVIDSHGKIVEQFTLNEIVNEYGG
NIYRTNYHDLLDTREQNREKARESWQTIENIKELKEGYISQVIHKITDLM
QKYHAVVVLEDLNMGFMRGRQKVEKQVYQKFEEMLINKLNYLVNKKADQN
SAGGLLHAYQLTSKFESFQKLGKQSGFLFYIPAWNTSKIDPVTGFVNLFD
TRYESIDKAKAFFGKFDSIRYNADKDWFEFAFDYNNFTTKAEGTRTNWTI
CTYGSRIRTFRNQAKNSQWDNEEIDLTKAYKAFFAKHGINIYDNIKEAIA
METEKSFFEDLLHLLKLTLQMRNSITGTTTDYLISPVHDSKGNFYDSRIC
DNSLPANADANGAYNIARKGLMLIQQIKDSTSSNRFKFSPITNKDWLIFA
QEKPYLND
>WP_024988992_(modified) hypothetical protein
[Prevotella albensis]
(SEQ ID NO: 97)
MNIKNFTGLYPLSKTLRFELKPIGKTKENIEKNGILTKDEQRAKDYLIV
KGFIDEYHKQFIKDRLWDFKLPLESEGEKNSLEEYQELYELTKRNDAQEA
DFTEIKDNLRSSITEQLTKSGSAYDRIFKKEFIREDLVNFLEDEKDKNIV
KQFEDFTTYFTGFYENRKNMYSSEEKSTAIAYRLIHQNLPKFMDNMRSFA
KIANSSVSERFSDIYESWKEYLNVNSIEEIFQLDYFSETLTQPHIEVYNY
IIGKKVLEDGTEIKGINEYVNLYNQQQKDKSKRLPFLVPLYKQILSDREK
LSWIAEEFDSDKKMLSAITESYNHLHNVLMGNENESLRNLLLNIKDYNLE
KINITNDLSLTEISQNLFGRYDVFTNGIKNKLRVLTPRKKKETDENFEDR
INKIFKTQKSFSIAFLNKLPQPEMEDGKPRNIEDYFITQGAINTKSIQKE
DIFAQIENAYEDAQVFLQIKDTDNKLSQNKTAVEKIKTLLDALKELQHFI
KPLLGSGEENEKDELFYGSFLAIWDELDTITPLYNKVRNWLTRKPYSTEK
IKLNFDNAQLLGGWDVNKEHDCAGILLRKNDSYYLGIINKKTNHIFDTDI
TPSDGECYDKIDYKLLPGANKMLPKVFFSKSRIKEFEPSEAIINCYKKGT
HKKGKNFNLTDCHRLINFFKTSIEKHEDWSKFGFKFSDTETYEDISGFYR
EVEQQGYRLTSHPVSASYIHSLVKEGKLYLFQIWNKDFSQFSKGTPNLHT
LYWKMLFDKRNLSDVVYKLNGQAEVFYRKSSIEHQNRIIHPAQHPITNKN
ELNKKHTSTFKYDIIKDRRYTVDKFQFHVPITINFKATGQNNINPIVQEV
IRQNGITHIIGIDRGERHLLYLSLIDLKGNIIKQMTLNEIINEYKGVTYK
TNYHNLLEKREKERTEARHSWSSIESIKELKDGYMSQVIHKITDMMVKYN
AIVVLEDLNGGFMRGRQKVEKQVYQKFEKKLIDKLNYLVDKKLDANEVGG
VLNAYQLTNKFESFKKIGKQSGFLFYIPAWNTSKIDPITGFVNLFNTRYE
SIKETKVFWSKFDIIRYNKEKNWFEFVFDYNTFTTKAEGTRTKWTLCTHG
TRIQTFRNPEKNAQWDNKEINLTESFKALFEKYKIDITSNLKESIMQETE
KKFFQELHNLLHLTLQMRNSVTGTDIDYLISPVADEDGNFYDSRINGKNF
PENADANGAYNIARKGLMLIRQIKQADPQKKFKFETITNKDWLKFAQDKP
YLKD
>WP_039658684_(modified) hypothetical protein
[Smithella sp. SC_K08D17]
(SEQ ID NO: 98)
MQTLFENFTNQYPVSKTLRFELIPQGKTKDFIEQKGLLKKDEDRAEKY
KKVKNIIDEYHKDFIEKSLNGLKLDGLEKYKTLYLKQEKDDKDKKAFDKE
KENLRKQIANAFRNNEKFKTLFAKELIKNDLMSFACEEDKKNVKEFEAFT
TYFTGFHQNRANMYVADEKRTAIASRLIHENLPKFIDNIKIFEKMKKEAP
ELLSPFNQTLKDMKDVIKGTTLEEIFSLDYFNKTLTQSGIDIYNSVIGGR
TPEEGKTKIKGLNEYINTDFNQKQTDKKKRQPKFKQLYKQILSDRQSLSF
IAEAFKNDTEILEAIEKFYVNELLHFSNEGKSTNVLDAIKNAVSNLESFN
LTKMYFRSGASLTDVSRKVFGEWSIINRALDNYYATTYPIKPREKSEKYE
ERKEKWLKQDFNVSLIQTAIDEYDNETVKGKNSGKVIADYFAKFCDDKET
DLIQKVNEGYIAVKDLLNTPCPENEKLGSNKDQVKQIKAFMDSIMDIMHF
VRPLSLKDTDKEKDETFYSLFTPLYDHLTQTIALYNKVRNYLTQKPYSTE
KIKLNFENSTLLGGWDLNKETDNTAIILRKDNLYYLGIMDKRHNRIFRNV
PKADKKDFCYEKMVYKLLPGANKMLPKVFFSQSRIQEFTPSAKLLENYAN
ETHKKGDNFNLNHCHKLIDFFKDSINKHEDWKNFDFRFSATSTYADLSGF
YHEVEHQGYKISFQSVADSFIDDLVNEGKLYLFQIYNKDFSPFSKGKPNL
HTLYWKMLFDENNLKDVVYKLNGEAEVFYRKKSIAEKNTTIHKANESIIN
KNPDNPKATSTFNYDIVKDKRYTIDKFQFHIPITMNFKAEGIFNMNQRVN
QFLKANPDINIIGIDRGERHLLYYALINQKGKILKQDTLNVIANEKQKVD
YHNLLDKKEGDRATARQEWGVIETIKELKEGYLSQVIHKLTDLMIENNAI
IVMEDLNFGFKRGRQKVEKQVYQKFEKMLIDKLNYLVDKNKKANELGGLL
NAFQLANKFESFQKMGKQNGFIFYVPAWNTSKTDPATGFIDFLKPRYENL
NQAKDFFEKFDSIRLNSKADYFEFAFDFKNFTEKADGGRTKWTVCTTNED
RYAWNRALNNNRGSQEKYDITAELKSLFDGKVDYKSGKDLKQQIASQESA
DFFKALMKNLSITLSLRHNNGEKGDNEQDYILSPVADSKGRFFDSRKADD
DMPKNADANGAYHIALKGLWCLEQISKTDDLKKVKLAISNKEWLEFVQTL
KG
>WP_037385181_(modified) hypothetical protein
[Smithella sp. SCADC]
(SEQ ID NO: 99)
MQTLFENFTNQYPVSKTLRFELIPQGKTKDFIEQKGLLKKDEDRAEKY
KKVKNIIDEYHKDFIEKSLNGLKLDGLEEYKTLYLKQEKDDKDKKAFDKE
KENLRKQIANAFRNNEKFKTLFAKELIKNDLMSFACEEDKKNVKEFEAFT
TYFTGFHQNRANMYVADEKRTAIASRLIHENLPKFIDNIKIFEKMKKEAP
ELLSPFNQTLKDMKDVIKGTTLEEIFSLDYFNKTLTQSGIDIYNSVIGGR
TPEEGKTKIKGLNEYINTDFNQKQTDKKKRQPKFKQLYKQILSDRQSLSF
IAEAFKNDTEILEAIEKFYVNELLHFSNEGKSTNVLDAIKNAVSNLESFN
LTKIYFRSGTSLTDVSRKVFGEWSIINRALDNYYATTYPIKPREKSEKYE
ERKEKWLKQDFNVSLIQTAIDEYDNETVKGKNSGKVIVDYFAKFCDDKET
DLIQKVNEGYIAVKDLLNTPYPENEKLGSNKDQVKQIKAFMDSIMDIMHF
VRPLSLKDTDKEKDETFYSLFTPLYDHLTQTIALYNKVRNYLTQKPYSTE
KIKLNFENSTLLGGWDLNKETDNTAIILRKENLYYLGIMDKRHNRIFRNV
PKADKKDSCYEKMVYKLLPGANKMLPKVFFSQSRIQEFTPSAKLLENYEN
ETHKKGDNFNLNHCHQLIDFFKDSINKHEDWKNFDFRFSATSTYADLSGF
YHEVEHQGYKISFQSIADSFIDDLVNEGKLYLFQIYNKDFSPFSKGKPNL
HTLYWKMLFDENNLKDVVYKLNGEAEVFYRKKSIAEKNTTIHKANESIIN
KNPDNPKATSTFNYDIVKDKRYTIDKFQFHVPITMNFKAEGIFNMNQRVN
QFLKANPDINIIGIDRGERHLLYYTLINQKGKILKQDTLNVIANEKQKVD
YHNLLDKKEGDRATARQEWGVIETIKELKEGYLSQVIHKLTDLMIENNAI
IVMEDLNFGFKRGRQKVEKQVYQKFEKMLIDKLNYLVDKNKKANELGGLL
NAFQLANKFESFQKMGKQNGFIFYVPAWNTSKTDPATGFIDFLKPRYENL
KQAKDFFEKFDSIRLNSKADYFEFAFDFKNFTGKADGGRTKWTVCTTNED
RYAWNRALNNNRGSQEKYDITAELKSLFDGKVDYKSGKDLKQQIASQELA
DFFRTLMKYLSVTLSLRHNNGEKGETEQDYILSPVADSMGKFFDSRKAGD
DMPKNADANGAYHIALKGLWCLEQISKTDDLKKVKLAISNKEWLEFMQTL
KG
>WP_039871282_(modified) hypothetical protein
[Prevotella bryantii]
(SEQ ID NO: 100)
MKFTDFTGLYSLSKTLRFELKPIGKTLENIKKAGLLEQDQHRADSYKK
VKKIIDEYHKAFIEKSLSNFELKYQSEDKLDSLEEYLMYYSMKRIEKTEK
DKFAKIQDNLRKQIADHLKGDESYKTIFSKDLIRKNLPDFVKSDEERTLI
KEFKDFTTYFKGFYENRENMYSAEDKSTAISHRIIHENLPKFVDNINAFS
KIILIPELREKLNQIYQDFEEYLNVESIDEIFHLDYFSMVMTQKQIEVYN
AIIGGKSTNDKKIQGLNEYINLYNQKHKDCKLPKLKLLFKQILSDRIAIS
WLPDNFKDDQEALDSIDTCYKNLLNDGNVLGEGNLKLLLENIDTYNLKGI
FIRNDLQLTDISQKMYASWNVIQDAVILDLKKQVSRKKKESAEDYNDRLK
KLYTSQESFSIQYLNDCLRAYGKTENIQDYFAKLGAVNNEHEQTINLFAQ
VRNAYTSVQAILTTPYPENANLAQDKETVALIKNLLDSLKRLQRFIKPLL
GKGDESDKDERFYGDFTPLWETLNQITPLYNMVRNYMTRKPYSQEKIKLN
FENSTLLGGWDLNKEHDNTAIILRKNGLYYLAIMKKSANKIFDKDKLDNS
GDCYEKMVYKLLPGANKMLPKVFFSKSRIDEFKPSENIIENYKKGTHKKG
ANFNLADCHNLIDFFKSSISKHEDWSKFNFHFSDTSSYEDLSDFYREVEQ
QGYSISFCDVSVEYINKMVEKGDLYLFQIYNKDFSEFSKGTPNMHTLYWN
SLFSKENLNNIIYKLNGQAEIFFRKKSLNYKRPTHPAHQAIKNKNKCNEK
KESIFDYDLVKDKRYTVDKFQFHVPITMNFKSTGNTNINQQVIDYLRTED
DTHIIGIDRGERHLLYLVVIDSHGKIVEQFTLNEIVNEYGGNIYRTNYHD
LLDTREQNREKARESWQTIENIKELKEGYISQVIHKITDLMQKYHAVVVL
EDLNMGFMRGRQKVEKQVYQKFEEMLINKLNYLVNKKADQNSAGGLLHAY
QLTSKFESFQKLGKQSGFLFYIPAWNTSKIDPVTGFVNLFDTRYESIDKA
KAFFGKFDSIRYNADKDWFEFAFDYNNFTTKAEGTRTNWTICTYGSRIRT
FRNQAKNSQWDNEEIDLTKAYKAFFAKHGINIYDNIKEAIAMETEKSFFE
DLLHLLKLTLQMRNSITGTTTDYLISPVHDSKGNFYDSRICDNSLPANAD
ANGAYNIARKGLMLIQQIKDSTSSNRFKFSPITNKDWLIFAQEKPYLND
>EKE28449_(modified) hypothetical protein ACD_
3C00058G0015 [uncultured bacterium (gcode 4)]
(SEQ ID NO: 101)
MFKGDAFTGLYEVQKTLRFELVPIGLTQSYLENDWVIQKDKEVEENY
GKIKAYFDLIHKEFVRQSLENAWLCQLDDFYEKYIELHNSLETRKDKNLA
KQFEKVMKSLKKEFVSFFDAKWNEWKQKFSFLKKWWIDVLNEKEVLDLMA
EFYPDEKELFDKFDKFFTYFSNFKESRKNFYADDGRAWAIATRAIDENLI
TFIKNIEDFKKLNSSFREFVNDNFSEEDKQIFEIDFYNNCLLQPWIDKYN
KIVWWYSLENWEKVQWLNEKINNFKQNQNKSNSKDLKFPRMKLLYKQILG
DKEKKVYIDEIRDDKNLIDLIDNSKRRNQIKIDNANDIINDFINNNAKFE
LDKIYLTRQSINTISSKYFSSWDYIRWYFWTGELQEFVSFYDLKETFWKI
EYETLENIFKDCYVKGINTESQNNIVFETQGIYENFLNIFKFEFNQNISQ
ISLLEWELDKIQNEDIKKNEKQVEVIKNYFDSVMSVYKMTKYFSLEKWKK
RVELDTDNNFYNDFNEYLEGFEIWKDYNLVRNYITKKQVNTDKIKLNFDN
SQFLTWWDKDKENERLGIILRREWKYYLWILKKWNTLNFGDYLQKEWEIF
YEKMNYKQLNNVYRQLPRLLFPLTKKLNELKWDELKKYLSKYIQNFWYNE
EIAQIKIEFDIFQESKEKWEKFDIDKLRKLIEYYKKWVLALYSDLYDLEF
IKYKNYDDLSIFYSDVEKKMYNLNFTKIDKSLIDGKVKSWELYLFQIYNK
DFSESKKEWSTENIHTKYFKLLFNEKNLQNLVVKLSWWADIFFRDKTENL
KFKKDKNGQEILDHRRFSQDKIMFHISITLNANCWDKYWFNQYVNEYMNK
ERDIKIIWIDRWEKHLAYYCVIDKSWKIFNNEIWTLNELNWVNYLEKLEK
IESSRKDSRISWWEIENIKELKNGYISQVINKLTELIVKYNAIIVFEDLN
IWFKRWRQKIEKQIYQKLELALAKKLNYLTQKDKKDDEILWNLKALQLVP
KVNDYQDIWNYKQSWIMFYVRANYTSVTCPNCWLRKNLYISNSATKENQK
KSLNSIAIKYNDWKFSFSYEIDDKSWKQKQSLNKKKFIVYSDIERFVYSP
LEKLTKVIDVNKKLLELFRDFNLSLDINKQIQEKDLDSVFFKSLTHLFNL
ILQLRNSDSKDNKDYISCPSCYYHSNNWLQWFEFNWDANWAYNIARKGII
LLDRIRKNQEKPDLYVSDIDWDNFVQSNQFPNTIIPIQNIEKQVPLNIKI
>WP_018359861_(modified) hypothetical protein
[Porphyromonas macacae]
(SEQ ID NO: 102)
MKTQHFFEDFTSLYSLSKTIRFELKPIGKTLENIKKNGLIRRDEQRLDD
YEKLKKVIDEYHEDFIANILSSFSFSEEILQSYIQNLSESEARAKIEKTM
RDTLAKAFSEDERYKSIFKKELVKKDIPVWCPAYKSLCKKFDNFTTSLVP
FHENRKNLYTSNETTASIPYRIVHVNLPKFIQNIEALCELQKKMGADLYL
EMMENLRNVWPSFVKTPDDLCNLKTYNHLMVQSSISEYNRFVGGYSTEDG
TKHQGINEWINIYRQRNKEMRLPGLVFLHKQILAKVDSSSFISDTLENDD
QVFCVLRQFRKLFWNTVSSKEDDAASLKDLFCGLSGYDPEAIYVSDAHLA
TISKNIFDRWNYISDAIRRKTEVLMPRKKESVERYAEKISKQIKKRQSYS
LAELDDLLAHYSEESLPAGFSLLSYFTSLGGQKYLVSDGEVILYEEGSNI
WDEVLIAFRDLQVILDKDFTEKKLGKDEEAVSVIKKALDSALRLRKFFDL
LSGTGAEIRRDSSFYALYTDRMDKLKGLLKMYDKVRNYLTKKPYSIEKFK
LHFDNPSLLSGWDKNKELNNLSVIFRQNGYYYLGIMTPKGKNLFKTLPKL
GAEEMFYEKMEYKQIAEPMLMLPKVFFPKKTKPAFAPDQSVVDIYNKKTF
KTGQKGFNKKDLYRLIDFYKEALTVHEWKLFNFSFSPTEQYRNIGEFFDE
VREQAYKVSMVNVPASYIDEAVENGKLYLFQIYNKDFSPYSKGIPNLHTL
YWKALFSEQNQSRVYKLCGGGELFYRKASLHMQDTTVHPKGISIHKKNLN
KKGETSLFNYDLVKDKRFTEDKFFFHVPISINYKNKKITNVNQMVRDYIA
QNDDLQIIGIDRGERNLLYISRIDTRGNLLEQFSLNVIESDKGDLRTDYQ
KILGDREQERLRRRQEWKSIESIKDLKDGYMSQVVHKICNMVVEHKAIVV
LENLNLSFMKGRKKVEKSVYEKFERMLVDKLNYLVVDKKNLSNEPGGLYA
AYQLTNPLFSFEELHRYPQSGILFFVDPWNTSLTDPSTGFVNLLGRINYT
NVGDARKFFDRFNAIRYDGKGNILFDLDLSRFDVRVETQRKLWTLTTFGS
RIAKSKKSGKWMVERIENLSLCFLELFEQFNIGYRVEKDLKKAILSQDRK
EFYVRLIYLFNLMMQIRNSDGEEDYILSPALNEKNLQFDSRLIEAKDLPV
DADANGAYNVARKGLMVVQRIKRGDHESIHRIGRAQWLRYVQEGIVE
>WP 013282991 (modified) hypothetical protein
[Butyrivibrio proteoclasticus]
(SEQ ID NO: 103)
MLLYENYTKRNQITKSLRLELRPQGKTLRNIKELNLLEQDKAIYALLE
RLKPVIDEGIKDIARDTLKNCELSFEKLYEHFLSGDKKAYAKESERLKKE
IVKTLIKNLPEGIGKISEINSAKYLNGVLYDFIDKTHKDSEEKQNILSDI
LETKGYLALFSKFLTSRITTLEQSMPKRVIENFEIYAANIPKMQDALERG
AVSFAIEYESICSVDYYNQILSQEDIDSYNRLISGIMDEDGAKEKGINQT
ISEKNIKIKSEHLEEKPFRILKQLHKQILEEREKAFTIDHIDSDEEVVQV
TKEAFEQTKEQWENIKKINGFYAKDPGDITLFIVVGPNQTHVLSQLIYGE
HDRIRLLLEEYEKNTLEVLPRRTKSEKARYDKFVNAVPKKVAKESHTFDG
LQKMTGDDRLFILYRDELARNYMRIKEAYGTFERDILKSRRGIKGNRDVQ
ESLVSFYDELTKFRSALRIINSGNDEKADPIFYNTFDGIFEKANRTYKAE
NLCRNYVTKSPADDARIMASCLGTPARLRTHWWNGEENFAINDVAMIRRG
DEYYYFVLTPDVKPVDLKTKDETDAQIFVQRKGAKSFLGLPKALFKCILE
PYFESPEHKNDKNCVIEEYVSKPLTIDRRAYDIFKNGTFKKTNIGIDGLT
EEKFKDDCRYLIDVYKEFIAVYTRYSCFNMSGLKRADEYNDIGEFFSDVD
TRLCTMEWIPVSFERINDMVDKKEGLLFLVRSMFLYNRPRKPYERTFIQL
FSDSNMEHTSMLLNSRAMIQYRAASLPRRVTHKKGSILVALRDSNGEHIP
MHIREAIYKMKNNFDISSEDFIMAKAYLAEHDVAIKKANEDIIRNRRYTE
DKFFLSLSYTKNADISARTLDYINDKVEEDTQDSRMAVIVTRNLKDLTYV
AVVDEKNNVLEEKSLNEIDGVNYRELLKERTKIKYHDKTRLWQYDVSSKG
LKEAYVELAVTQISKLATKYNAVVVVESMSSTFKDKFSFLDEQIFKAFEA
RLCARMSDLSFNTIKEGEAGSISNPIQVSNNNGNSYQDGVIYFLNNAYTR
TLCPDTGFVDVFDKTRLITMQSKRQFFAKMKDIRIDDGEMLFTFNLEEYP
TKRLLDRKEWTVKIAGDGSYFDKDKGEYVYVNDIVREQIIPALLEDKAVF
DGNMAEKFLDKTAISGKSVELIYKWFANALYGIITKKDGEKIYRSPITGT
EIDVSKNTTYNFGKKFMFKQEYRGDGDFLDAFLNYMQAQDIAV
>AIZ56868_(modified) hypothetical protein Mpt1_
c09950 [Candidatus Methanoplasma termitum]
(SEQ ID NO: 104)
MNNYDEFTKLYPIQKTIRFELKPQGRTMEHLETFNFFEEDRDRAEKYK
ILKEAIDEYHKKFIDEHLTNMSLDWNSLKQISEKYYKSREEKDKKVFLSE
QKRMRQEIVSEFKKDDRFKDLFSKKLFSELLKEEIYKKGNHQEIDALKSF
DKFSGYFIGLHENRKNMYSDGDEITAISNRIVNENFPKFLDNLQKYQEAR
KKYPEWIIKAESALVAHNIKMDEVFSLEYFNKVLNQEGIQRYNLALGGYV
TKSGEKMMGLNDALNLAHQSEKSSKGRIHMTPLFKQILSEKESFSYIPDV
FTEDSQLLPSIGGFFAQIENDKDGNIFDRALELISSYAEYDTERIYIRQA
DINRVSNVIFGEWGTLGGLMREYKADSINDINLERTCKKVDKWLDSKEFA
LSDVLEAIKRTGNNDAFNEYISKMRTAREKIDAARKEMKFISEKISGDEE
SIHIIKTLLDSVQQFLHFFNLFKARQDIPLDGAFYAEFDEVHSKLFAIVP
LYNKVRNYLTKNNLNTKKIKLNFKNPTLANGWDQNKVYDYASLIFLRDGN
YYLGIINPKRKKNIKFEQGSGNGPFYRKMVYKQIPGPNKNLPRVFLTSTK
GKKEYKPSKEIIEGYEADKHIRGDKFDLDFCHKLIDFFKESIEKHKDWSK
FNFYFSPTESYGDISEFYLDVEKQGYRMHFENISAETIDEYVEKGDLFLF
QIYNKDFVKAATGKKDMHTIYWNAAFSPENLQDVVVKLNGEAELFYRDKS
DIKEIVHREGEILVNRTYNGRTPVPDKIHKKLTDYHNGRTKDLGEAKEYL
DKVRYFKAHYDITKDRRYLNDKIYFHVPLTLNFKANGKKNLNKMVIEKFL
SDEKAHIIGIDRGERNLLYYSIIDRSGKIIDQQSLNVIDGFDYREKLNQR
EIEMKDARQSWNAIGKIKDLKEGYLSKAVHEITKMAIQYNAIVVMEELNY
GFKRGRFKVEKQIYQKFENMLIDKMNYLVFKDAPDESPGGVLNAYQLTNP
LESFAKLGKQTGILFYVPAAYTSKIDPTTGFVNLFNTSSKTNAQERKEFL
QKFESISYSAKDGGIFAFAFDYRKFGTSKTDHKNVWTAYTNGERMRYIKE
KKRNELFDPSKEIKEALTSSGIKYDGGQNILPDILRSNNNGLIYTMYSSF
IAAIQMRVYDGKEDYIISPIKNSKGEFFRTDPKRRELPIDADANGAYNIA
LRGELTMRAIAEKFDPDSEKMAKLELKHKDWFEFMQTRGD
>WP_027407524_(modified) hypothetical protein
[Anaerovibrio sp. RM50]
(SEQ ID NO: 105)
MVAFIDEFVGQYPVSKTLRFEARPVPETKKWLESDQCSVLFNDQKRN
EYYGVLKELLDDYYRAYIEDALTSFTLDKALLENAYDLYCNRDTNAFSSC
CEKLRKDLVKAFGNLKDYLLGSDQLKDLVKLKAKVDAPAGKGKKKIEVDS
RLINWLNNNAKYSAEDREKYIKAIESFEGFVTYLTNYKQARENMFSSEDK
STAIAFRVIDQNMVTYFGNIRIYEKIKAKYPELYSALKGFEKFFSPTAYS
EILSQSKIDEYNYQCIGRPIDDADFKGVNSLINEYRQKNGIKARELPVMS
MLYKQILSDRDNSFMSEVINRNEEAIECAKNGYKVSYALFNELLQLYKKI
FTEDNYGNIYVKTQPLTELSQALFGDWSILRNALDNGKYDKDIINLAELE
KYFSEYCKVLDADDAAKIQDKFNLKDYFIQKNALDATLPDLDKITQYKPH
LDAMLQAIRKYKLFSMYNGRKKMDVPENGIDFSNEFNAIYDKLSEFSILY
DRIRNFATKKPYSDEKMKLSFNMPTNILAGWDYNNETANGCFLFIKDGKY
FLGVADSKSKNIFDFKKNPHLLDKYSSKDIYYKVKYKQVSGSAKMLPKVV
FAGSNEKIFGHLISKRILEIREKKLYTAAAGDRKAVAEWIDFMKSAIAIH
PEWNEYFKFKFKNTAEYDNANKFYEDIDKQTYSLEKVEIPTEYIDEMVSQ
HKLYLFQLYTKDFSDKKKKKGTDNLHTMYWHGVFSDENLKAVTEGTQPII
KLNGEAEMFMRNPSIEFQVTHEHNKPIANKNPLNTKKESVFNYDLIKDKR
YTERKFYFHCPITLNFRADKPIKYNEKINRFVENNPDVCIIGIDRGERHL
LYYTVINQTGDILEQGSLNKISGSYTNDKGEKVNKETDYHDLLDRKEKGK
HVAQQAWETIENIKELKAGYLSQVVYKLTQLMLQYNAVIVLENLNVGFKR
GRTKVEKQVYQKFEKAMIDKLNYLVFKDRGYEMNGSYAKGLQLTDKFESF
DKIGKQTGCIYYVIPSYTSHIDPKTGFVNLLNAKLRYENITKAQDTIRKF
DSISYNAKADYFEFAFDYRSFGVDMARNEWVVCTCGDLRWEYSAKTRETK
AYSVTDRLKELFKAHGIDYVGGENVSHITEVADKHFLSTLLFYLRLVLKM
RYTVSGTENENDFILSPVEYAPGKFFDSREATSTEPMNADANGAYHIALK
GLMTIRGIEDGKLHNYGKGGENAAWFKFMQNQEYKNNG
>WP_044910712_(modified) hypothetical protein
[Lachnospiraceae bacterium MC2017]
(SEQ ID NO: 106)
MDYGNGQFERRAPLTKTITLRLKPIGETRETIREQKLLEQDAAFRKLVE
TVTPIVDDCIRKIADNALCHFGTEYDFSCLGNAISKNDSKAIKKETEKVE
KLLAKVLTENLPDGLRKVNDINSAAFIQDTLTSFVQDDADKRVLIQELKG
KTVLMQRFLTTRITALTVWLPDRVFENFNIFIENAEKMRILLDSPLNEKI
MKFDPDAEQYASLEFYGQCLSQKDIDSYNLIISGIYADDEVKNPGINEIV
KEYNQQIRGDKDESPLPKLKKLHKQILMPVEKAFFVRVLSNDSDARSILE
KILKDTEMLPSKIIEAMKEADAGDIAVYGSRLHELSHVIYGDHGKLSQII
YDKESKRISELMETLSPKERKESKKRLEGLEEHIRKSTYTFDELNRYAEK
NVMAAYIAAVEESCAEIMRKEKDLRTLLSKEDVKIRGNRHNTLIVKNYFN
AWTVFRNLIRILRRKSEAEIDSDFYDVLDDSVEVLSLTYKGENLCRSYIT
KKIGSDLKPEIATYGSALRPNSRWWSPGEKFNVKFHTIVRRDGRLYYFIL
PKGAKPVELEDMDGDIECLQMRKIPNPTIFLPKLVFKDPEAFFRDNPEAD
EFVFLSGMKAPVTITRETYEAYRYKLYTVGKLRDGEVSEEEYKRALLQVL
TAYKEFLENRMIYADLNFGFKDLEEYKDSSEFIKQVETHNTFMCWAKVSS
SQLDDLVKSGNGLLFEIWSERLESYYKYGNEKVLRGYEGVLLSILKDENL
VSMRTLLNSRPMLVYRPKESSKPMVVHRDGSRVVDRFDKDGKYIPPEVHD
ELYRFFNNLLIKEKLGEKARKILDNKKVKVKVLESERVKWSKFYDEQFAV
TFSVKKNADCLDTTKDLNAEVMEQYSESNRLILIRNTTDILYYLVLDKNG
KVLKQRSLNIINDGARDVDWKERFRQVTKDRNEGYNEWDYSRTSNDLKEV
YLNYALKEIAEAVIEYNAILIIEKMSNAFKDKYSFLDDVTFKGFETKLLA
KLSDLHFRGIKDGEPCSFTNPLQLCQNDSNKILQDGVIFMVPNSMTRSLD
PDTGFIFAINDHNIRTKKAKLNFLSKFDQLKVSSEGCLIMKYSGDSLPTH
NTDNRVWNCCCNHPITNYDRETKKVEFIEEPVEELSRVLEENGIETDTEL
NKLNERENVPGKVVDAIYSLVLNYLRGTVSGVAGQRAVYYSPVTGKKYDI
SFIQAMNLNRKCDYYRIGSKERGEWTDFVAQLIN
>WP_027216152_(modified) hypothetical protein
[Butyrivibrio fibrisolvens]
(SEQ ID NO: 107)
MYYESLTKLYPIKKTIRNELVPIGKTLENIKKNNILEADEDRKIAYIRVK
AIMDDYHKRLINEALSGFALIDLDKAANLYLSRSKSADDIESFSRFQDKL
RKAIAKRLREHENFGKIGNKDIIPLLQKLSENEDDYNALESFKNFYTYFE
SYNDVRLNLYSDKEKSSTVAYRLINENLPRFLDNIRAYDAVQKAGITSEE
LSSEAQDGLFLVNTFNNVLIQDGINTYNEDIGKLNVAINLYNQKNASVQG
FRKVPKMKVLYKQILSDREESFIDEFESDTELLDSLESHYANLAKYFGSN
KVQLLFTALRESKGVNVYVKNDIAKTSFSNVVFGSWSRIDELINGEYDDN
NNRKKDEKYYDKRQKELKKNKSYTIEKIITLSTEDVDVIGKYIEKLESDI
DDIRFKGKNFYEAVLCGHDRSKKLSKNKGAVEAIKGYLDSVKDFERDLKL
INGSGQELEKNLVVYGEQEAVLSELSGIDSLYNMTRNYLTKKPFSTEKIK
LNFNKPTFLDGWDYGNEEAYLGFFMIKEGNYFLAVMDANWNKEFRNIPSV
DKSDCYKKVIYKQISSPEKSIQNLMVIDGKTVKKNGRKEKEGIHSGENLI
LEELKNTYLPKKINDIRKRRSYLNGDTFSKKDLTEFIGYYKQRVIEYYNG
YSFYFKSDDDYASFKEFQEDVGRQAYQISYVDVPVSFVDDLINSGKLYLF
RVYNKDFSEYSKGRLNLHTLYFKMLFDERNLKNVVYKLNGQAEVFYRPSS
IKKEELIVHRAGEEIKNKNPKRAAQKPTRRLDYDIVKDRRYSQDKFMLHT
SIIMNFGAEENVSFNDIVNGVLRNEDKVNVIGIDRGERNLLYVVVIDPEG
KILEQRSLNCITDSNLDIETDYHRLLDEKESDRKIARRDWTTIENIKELK
AGYLSQVVHIVAELVLKYNAIICLEDLNFGFKRGRQKVEKQVYQKFEKML
IDKLNYLVMDKSREQLSPEKISGALNALQLTPDFKSFKVLGKQTGIIYYV
PAYLTSKIDPMTGFANLFYVKYENVDKAKEFFSKFDSIKYNKDGKNWNTK
GYFEFAFDYKKFTDRAYGRVSEWTVCTVGERIIKFKNKEKNNSYDDKVID
LTNSLKELFDSYKVTYESEVDLKDAILAIDDPAFYRDLTRRLQQTLQMRN
SSCDGSRDYIISPVKNSKGEFFCSDNNDDTTPNDADANGAFNIARKGLWV
LNEIRNSEEGSKINLAMSNAQWLEYAQDNTI
>WP_016301126_(modified) hypothetical protein
[Lachnospiraceae bacterium COE1]
(SEQ ID NO: 108)
MHENNGKIADNFIGIYPVSKTLRFELKPVGKTQEYIEKHGILDEDLKRA
GDYKSVKKIIDAYHKYFIDEALNGIQLDGLKNYYELYEKKRDNNEEKEFQ
KIQMSLRKQIVKRFSEHPQYKYLFKKELIKNVLPEFTKDNAEEQTLVKSF
QEFTTYFEGFHQNRKNMYSDEEKSTAIAYRVVHQNLPKYIDNMRIFSMIL
NTDIRSDLTELFNNLKTKMDITIVEEYFAIDGFNKVVNQKGIDVYNTILG
AFSTDDNTKIKGLNEYINLYNQKNKAKLPKLKPLFKQILSDRDKISFIPE
QFDSDTEVLEAVDMFYNRLLQFVIENEGQITISKLLTNFSAYDLNKIYVK
NDTTISAISNDLFDDWSYISKAVRENYDSENVDKNKRAAAYEEKKEKALS
KIKMYSIEELNFFVKKYSCNECHIEGYFERRILEILDKMRYAYESCKILH
DKGLINNISLCQDRQAISELKDFLDSIKEVQWLLKPLMIGQEQADKEEAF
YTELLRIWEELEPITLLYNKVRNYVTKKPYTLEKVKLNFYKSTLLDGWDK
NKEKDNLGIILLKDGQYYLGIMNRRNNKIADDAPLAKTDNVYRKMEYKLL
TKVSANLPRIFLKDKYNPSEEMLEKYEKGTHLKGENFCIDDCRELIDFFK
KGIKQYEDWGQFDFKFSDTESYDDISAFYKEVEHQGYKITFRDIDETYID
SLVNEGKLYLFQIYNKDFSPYSKGTKNLHTLYWEMLFSQQNLQNIVYKLN
GNAEIFYRKASINQKDVVVHKADLPIKNKDPQNSKKESMFDYDIIKDKRF
TCDKYQFHVPITMNFKALGENHFNRKVNRLIHDAENMHIIGIDRGERNLI
YLCMIDMKGNIVKQISLNEIISYDKNKLEHKRNYHQLLKTREDENKSARQ
SWQTIHTIKELKEGYLSQVIHVITDLMVEYNAIVVLEDLNFGFKQGRQKF
ERQVYQKFEKMLIDKLNYLVDKSKGMDEDGGLLHAYQLTDEFKSFKQLGK
QSGFLYYIPAWNTSKLDPTTGFVNLFYTKYESVEKSKEFINNFTSILYNQ
EREYFEFLFDYSAFTSKAEGSRLKWTVCSKGERVETYRNPKKNNEWDTQK
IDLTFELKKLFNDYSISLLDGDLREQMGKIDKADFYKKFMKLFALIVQMR
NSDEREDKLISPVLNKYGAFFETGKNERMPLDADANGAYNIARKGLWIIE
KIKNTDVEQLDKVKLTISNKEWLQYAQEHIL
>WP_035635841_(modified) hypothetical protein
[Lachnospiraceae bacterium ND2006]
(SEQ ID NO: 109)
MSKLEKFTNCYSLSKTLRFKAIPVGKTQENIDNKRLLVEDEKRAEDYK
GVKKLLDRYYLSFINDVLHSIKLKNLNNYISLFRKKTRTEKENKELENLE
INLRKEIAKAFKGNEGYKSLFKKDIIETILPEFLDDKDEIALVNSFNGFT
TAFTGFFDNRENMFSEEAKSTSIAFRCINENLTRYISNMDIFEKVDAIFD
KHEVQEIKEKILNSDYDVEDFFEGEFFNFVLTQEGIDVYNAIIGGFVTES
GEKIKGLNEYINLYNQKTKQKLPKFKPLYKQVLSDRESLSFYGEGYTSDE
EVLEVFRNTLNKNSEIFSSIKKLEKLFKNFDEYSSAGIFVKNGPAISTIS
KDIFGEWNVIRDKWNAEYDDIHLKKKAVVTEKYEDDRRKSFKKIGSFSLE
QLQEYADADLSVVEKLKEIIIQKVDEIYKVYGSSEKLFDADFVLEKSLKK
NDAVVAIMKDLLDSVKSFENYIKAFFGEGKETNRDESFYGDFVLAYDILL
KVDHIYDAIRNYVTQKPYSKDKFKLYFQNPQFMGGWDKDKETDYRATILR
YGSKYYLAIMDKKYAKCLQKIDKDDVNGNYEKINYKLLPGPNKMLPKVFF
SKKWMAYYNPSEDIQKIYKNGTFKKGDMFNLNDCHKLIDFFKDSISRYPK
WSNAYDFNFSETEKYKDIAGFYREVEEQGYKVSFESASKKEVDKLVEEGK
LYMFQIYNKDFSDKSHGTPNLHTMYFKLLFDENNHGQIRLSGGAELFMRR
ASLKKEELVVHPANSPIANKNPDNPKKTTTLSYDVYKDKRFSEDQYELHI
PIAINKCPKNIFKINTEVRVLLKHDDNPYVIGIDRGERNLLYIVVVDGKG
NIVEQYSLNEIINNFNGIRIKTDYHSLLDKKEKERFEARQNWTSIENIKE
LKAGYISQVVHKICELVEKYDAVIALEDLNSGFKNSRVKVEKQVYQKFEK
MLIDKLNYMVDKKSNPCATGGALKGYQITNKFESFKSMSTQNGFIFYIPA
WLTSKIDPSTGFVNLLKTKYTSIADSKKFISSFDRIMYVPEEDLFEFALD
YKNFSRTDADYIKKWKLYSYGNRIRIFRNPKKNNVFDWEEVCLTSAYKEL
FNKYGINYQQGDIRALLCEQSDKAFYSSFMALMSLMLQMRNSITGRTDVD
FLISPVKNSDGIFYDSRNYEAQENAILPKNADANGAYNIARKVLWAIGQF
KKAEDEKLDKVKIAISNKEWLEYAQTSVKH
>WP_015504779_(modified) exonuclease SbcC
[Candidatus Methanomethylophilus alvus]
(SEQ ID NO: 110)
MDAKEFTGQYPLSKTLRFELRPIGRTWDNLEASGYLAEDRHRAECYP
RAKELLDDNHRAFLNRVLPQIDMDWHPIAEAFCKVHKNPGNKELAQDYNL
QLSKRRKEISAYLQDADGYKGLFAKPALDEAMKIAKENGNESDIEVLEAF
NGFSVYFTGYBESRENIYSDEDMVSVAYRITEDNFPRFVSNALIFDKLNE
SHPDIISEVSGNLGVDDIGKYFDVSNYNNFLSQAGIDDYNHIIGGHTTED
GLIQAFNVVLNLRHQKDPGFEKIQFKQLYKQILSVRTSKSYIPKQFDNSK
EMVDCICDYVSKIEKSETVERALKLVRNISSFDLRGIFVNKKNLRILSNK
LIGDWDAIETALMHSSSSENDKKSVYDSAEAFTLDDIFSSVKKFSDASAE
DIGNRAEDICRVISETAPFINDLRAVDLDSLNDDGYEAAVSKIRESLEPY
MDLFHELEIFSVGDEFPKCAAFYSELEEVSEQLIEIIPLFNKARSFCTRK
RYSTDKIKVNLKFPTLADGWDLNKERDNKAAILRKDGKYYLAILDMKKDL
SSIRTSDEDESSFEKMEYKLLPSPVKMLPKIFVKSKAAKEKYGLTDRMLE
CYDKGMHKSGSAFDLGFCHELIDYYKRCIAEYPGWDVFDFKFRETSDYGS
MKEFNEDVAGAGYYMSLRKIPCSEVYRLLDEKSIYLFQIYNKDYSENAHG
NKNMHTMYWEGLFSPQNLESPVFKLSGGAELFFRKSSIPNDAKTVHPKGS
VLVPRNDVNGRRIPDSIYRELTRYFNRGDCRISDEAKSYLDKVKTKKADH
DIVKDRRFTVDKMMFHVPIAMNFKAISKPNLNKKVIDGIIDDQDLKIIGI
DRGERNLIYVTMVDRKGNILYQDSLNILNGYDYRKALDVREYDNKEARRN
WTKVEGIRKMKEGYLSLAVSKLADMIIENNAIIVMEDLNHGFKAGRSKIE
KQVYQKFESMLINKLGYMVLKDKSIDQSGGALHGYQLANHVTTLASVGKQ
CGVIFYIPAAFTSKIDPTTGFADLFALSNVKNVASMREFFSKMKSVIYDK
AEGKFAFTFDYLDYNVKSECGRTLWTVYTVGERFTYSRVNREYVRKVPTD
IIYDALQKAGISVEGDLRDRIAESDGDTLKSIFYAFKYALDMRVENREED
YIQSPVKNASGEFFCSKNAGKSLPQDSDANGAYNIALKGILQLRMLSEQY
DPNAESIRLPLITNKAWLTFMQSGMKTWKN
>WP_044910713_(modified) hypothetical protein
[Lachnospiraceae bacterium MC2017]
(SEQ ID NO: 111)
MGLYDGFVNRYSVSKTLRFELIPQGRTREYIETNGILSDDEERAKDYK
TIKRLIDEYHKDYISRCLKNVNISCLEEYYHLYNSSNRDKRHEELDALSD
QMRGEIASFLTGNDEYKEQKSRDIIINERIINFASTDEELAAVKRFRKFT
SYFTGFFTNRENMYSAEKKSTAIAHRIIDVNLPKYVDNIKAFNTAIEAGV
FDIAEFESNFKAITDEHEVSDLLDITKYSRFIRNEDIIIYNTLLGGISMK
DEKIQGLNELINLHNQKHPGKKVPLLKVLYKQILGDSQTHSFVDDQFEDD
QQVINAVKAVTDTFSETLLGSLKIIINNIGHYDLDRIYIKAGQDITTLSK
RALNDWHIITECLESEYDDKFPKNKKSDTYEEMRNRYVKSFKSFSIGRLN
SLVTTYTEQACFLENYLGSFGGDTDKNCLTDFTNSLMEVEHLLNSEYPVT
NRLITDYESVRILKRLLDSEMEVIHFLKPLLGNGNESDKDLVFYGEFEAE
YEKLLPVIKVYNRVRNYLTRKPFSTEKIKLNFNSPTLLCGWSQSKEKEYM
GVILRKDGQYYLGIMTPSNKKIFSEAPKPDEDCYEKMVLRYIPHPYQMLP
KVFFSKSNIAFFNPSDEILRIKKQESFKKGKSFNRDDCHKFIDFYKDSIN
RHEEWRKFNFKFSDTDSYEDISRFYKEVENQAFSMSFTKIPTVYIDSLVD
EGKLYLFKLHNKDFSEHSKGKPNLHTVYWNALFSEYNLQNTVYQLNGSAE
IFFRKASIPENERVIHKKNVPITRKVAELNGKKEVSVFPYDIIKNRRYTV
DKFQFHVPLKMNFKADEKKRINDDVIEAIRSNKGIHVIGIDRGERNLLYL
SLINEEGRIIEQRSLNIIDSGEGHTQNYRDLLDSREKDREKARENWQEIQ
EIKDLKTGYLSQAIHTITKWMKEYNAIIVLEDLNDRFTNGRKKVEKQVYQ
KFEKMLIDKLNYYVDKDEEFDRMGGTHRALQLTEKFESFQKLGRQTGFIF
YVPAWNTSKLDPTTGFVDLLYPKYKSVDATKDFIKKFDFIRFNSEKNYFE
FGLHYSNFTERAIGCRDEWILCSYGNRIVNFRNAAKNNSWDYKEIDITKQ
LLDLFEKNGIDVKQENLIDSICEMKDKPFFKSLIANIKLILQIRNSASGT
DIDYMISPAMNDRGEFFDTRKGLQQLPLDADANGAYNIAKKGLWIVDQIR
NTTGNNVKMAMSNREWMHFAQESRLA
>KKQ36153_(modified) hypothetical protein US52_
C0007G0008 [candidate division WS6 bacterium
GW2011_GWA2_37_6]
(SEQ ID NO: 112)
MKNVFGGFTNLYSLTKTLRFELKPTSKTQKLMKRNNVIQTDEEIDKLY
HDEMKPILDEIHRRFINDALAQKIFISASLDNFLKVVKNYKVESAKKNIK
QNQVKLLQKEITIKTLGLRREVVSGFITVSKKWKDKYVGLGIKLKGDGYK
VLTEQAVLDILKIEFPNKAKYIDKFRGFWTYFSGFNENRKNYYSEEDKAT
SIANRIVNENLSRYIDNIIAFEEILQKIPNLKKFKQDLDITSYNYYLNQA
GIDKYNKIIGGYIVDKDKKIQGINEKVNLYTQQTKKKLPKLKFLFKQIGS
ERKGFGIFEIKEGKEWEQLGDLFKLQRTKINSNGREKGLFDSLRTMYREF
FDEIKRDSNSQARYSLDKIYFNKASVNTISNSWFTNWNKFAELLNIKEDK
KNGEKKIPEQISIEDIKDSLSIIPKENLEELFKLTNREKHDRTRFFGSNA
WVTFLNIWQNEIEESFNKLEEKEKDFKKNAAIKFQKNNLVQKNYIKEVCD
RMLAIERMAKYHLPKDSNLSREEDFYWIIDNLSEQREIYKYYNAFRNYIS
KKPYNKSKMKLNFENGNLLGGWSDGQERNKAGVILRNGNKYYLGVLINRG
IFRTDKINNEIYRTGSSKWERLILSNLKFQTLAGKGFLGKHGVSYGNMNP
EKSVPSLQKFIRENYLKKYPQLTEVSNTKFLSKKDFDAAIKEALKECFTM
NFINIAENKLLEAEDKGDLYLFEITNKDFSGKKSGKDNIHTIYWKYLFSE
SNCKSPIIGLNGGAEIFFREGQKDKLHTKLDKKGKKVFDAKRYSEDKLFF
HVSITINYGKPKNIKFRDIINQLITSMNVNIIGIDRGEKHLLYYSVIDSN
GIILKQGSLNKIRVGDKEVDFNKKLTERANEMKKARQSWEQIGNIKNFKE
GYLSQAIHEIYQLMIKYNAIIVLEDLNTEFKAKRLSKVEKSVYKKFELKL
ARKLNHLILKDRNTNEIGGVLKAYQLTPTIGGGDVSKFEKAKQWGMNIFY
VRANYTSTTDPVTGWRKHLYISNFSNNSVIKSFFDPTNRDTGIEIFYSGK
YRSWGFRYVQKETGKKWELFATKELERFKYNQTTKLCEKINLYDKFEELF
KGIDKSADIYSQLCNVLDFRWKSLVYLWNLLNQIRNVDKNAEGNKNDFIQ
SPVYPFFDSRKTDGKTEPINGDANGALNIARKGLMLVERIKNNPEKYEQL
IRDTEWDAWIQNFNKVN
>WP_044919442_(modified) hypothetical protein
[Lachnospiraceae bacterium MA2020]
(SEQ ID NO: 113)
MYYESLTKQYPVSKTIRNELIPIGKTLDNIRQNNILESDVKRKQNYEHV
KGILDEYHKQLINEALDNCTLPSLKIAAEIYLKNQKEVSDREDFNKTQDL
LRKEVVEKLKAHENFTKIGKKDILDLLEKLPSISEDDYNALESFRNFYTY
FTSYNKVRENLYSDKEKSSTVAYRLINENFPKFLDNVKSYRFVKTAGILA
DGLGEEEQDSLFIVETFNKTLTQDGIDTYNSQVGKINSSINLYNQKNQKA
NGFRKIPKMKMLYKQILSDREESFIDEFQSDEVLIDNVESYGSVLIESLK
SSKVSAFFDALRESKGKNVYVKNDLAKTAMSNIVFENWRTFDDLLNQEYD
LANENKKKDDKYFEKRQKELKKNKSYSLEHLCNLSEDSCNLIENYIHQIS
DDIENIIINNETFLRIVINEHDRSRKLAKNRKAVKAIKDFLDSIKVLERE
LKLINSSGQELEKDLIVYSAHEELLVELKQVDSLYNMTRNYLTKKPFSTE
KVKLNFNRSTLLNGWDRNKETDNLGVLLLKDGKYYLGIMNTSANKAFVNP
PVAKTEKVFKKVDYKLLPVPNQMLPKVFFAKSNIDFYNPSSEIYSNYKKG
THKKGNMFSLEDCHNLIDFFKESISKHEDWSKFGFKFSDTASYNDISEFY
REVEKQGYKLTYTDIDETYINDLIERNELYLFQIYNKDFSMYSKGKLNLH
TLYFMMLFDQRNIDDVVYKLNGEAEVFYRPASISEDELIIHKAGEEIKNK
NPNRARTKETSTFSYDIVKDKRYSKDKFTLHIPITMNFGVDEVKRFNDAV
NSAIRIDENVNVIGIDRGERNLLYVVVIDSKGNILEQISLNSIINKEYDI
ETDYHALLDEREGGRDKARKDWNTVENIRDLKAGYLSQVVNVVAKLVLKY
NAIICLEDLNFGFKRGRQKVEKQVYQKFEKMLIDKLNYLVIDKSREQTSP
KELGGALNALQLTSKFKSFKELGKQSGVIYYVPAYLTSKIDPTTGFANLF
YMKCENVEKSKRFFDGFDFIRFNALENVFEFGFDYRSFTQRACGINSKWT
VCTNGERIIKYRNPDKNNMFDEKVVVVTDEMKNLFEQYKIPYEDGRNVKD
MIISNEEAEFYRRLYRLLQQTLQMRNSTSDGTRDYIISPVKNKREAYFNS
ELSDGSVPKDADANGAYNIARKGLWVLEQIRQKSEGEKINLAMTNAEWLE
YAQTHLL
>WP_035798880_(modified) hypothetical protein
[Butyrivibrio sp. NC3005]
(SEQ ID NO: 114)
MYYQNLTKKYPVSKTIRNELIPIGKTLENIRKNNILESDVKRKQDYEH
VKGIMDEYHKQLINEALDNYMLPSLNQAAEIYLKKHVDVEDREEFKKTQD
LLRREVTGRLKEHENYTKIGKKDILDLLEKLPSISEEDYNALESFRNFYT
YFTSYNKVRENLYSDEEKSSTVAYRLINENLPKFLDNIKSYAFVKAAGVL
ADCIEEEEQDALFMVETFNMTLTQEGIDMYNYQIGKVNSAINLYNQKNHK
VEEFKKIPKMKVLYKQILSDREEVFIGEFKDDETLLSSIGAYGNVLMTYL
KSEKINIFFDALRESEGKNVYVKNDLSKTTMSNIVFGSWSAFDELLNQEY
DLANENKKKDDKYFEKRQKELKKNKSYTLEQMSNLSKEDISPIENYIERI
SEDIEKICIYNGEFEKIVVNEHDSSRKLSKNIKAVKVIKDYLDSIKELEH
DIKLINGSGQELEKNLVVYVGQEEALEQLRPVDSLYNLTRNYLTKKPFST
EKVKLNFNKSTLLNGWDKNKETDNLGILFFKDGKYYLGIMNTTANKAFVN
PPAAKTENVFKKVDYKLLPGSNKMLPKVFFAKSNIGYYNPSTELYSNYKK
GTHKKGPSFSIDDCHNLIDFFKESIKKHEDWSKFGFEFSDTADYRDISEF
YREVEKQGYKLTFTDIDESYINDLIEKNELYLFQIYNKDFSEYSKGKLNL
HTLYFMMLFDQRNLDNVVYKLNGEAEVFYRPASIAENELVIHKAGEGIKN
KNPNRAKVKETSTFSYDIVKDKRYSKYKFTLHIPITMNFGVDEVRRFNDV
INNALRTDDNVNVIGIDRGERNLLYVVVINSEGKILEQISLNSIINKEYD
IETNYHALLDEREDDRNKARKDWNTIENIKELKTGYLSQVVNVVAKLVLK
YNAIICLEDLNFGFKRGRQKVEKQVYQKFEKMLIEKLNYLVIDKSREQVS
PEKMGGALNALQLTSKFKSFAELGKQSGIIYYVPAYLTSKIDPTTGFVNL
FYIKYENIEKAKQFFDGEDFIRFNKKDDMFEFSFDYKSFTQKACGIRSKW
IVYTNGERIIKYPNPEKNNLEDEKVINVTDEIKGLEKQYRIPYENGEDIK
EIIISKAEADFYKRLFRLLHQTLQMRNSTSDGTRDYIISPVKNDRGEFFC
SEFSEGTMPKDADANGAYNIARKGLWVLEQIRQKDEGEKVNLSMTNAEWL
KYAQLHLL
>WP_027109509_(modified) hypothetical protein
[Lachnospiraceae bacterium NC2008]
(SEQ ID NO: 1581)
MENYYDSLTRQYPVTKTIRQELKPVGKTLENIKNAEIIEADKQKKEAY
VKVKELMDEFHKSIIEKSLVGIKLDGLSEFEKLYKIKTKTDEDKNRISEL
FYYMRKQIADALKNSRDYGYVDNKDLIEKILPERVKDENSLNALSCFKGF
TTYFTDYYKNRKNIYSDEEKHSTVGYRCINENLLIFMSNIEVYQIYKKAN
IKNDNYDEETLDKTEMIESFNECLTQSGVEAYNSVVASIKTATNLYIQKN
NKEENFVRVPKMKVLFKQILSDRTSLEDGLIIESDDELLDKLCSFSAEVD
KFLPINIDRYIKTLMDSNNGTGIYVKNDSSLTTLSNYLTDSWSSIRNAFN
ENYDAKYTGKVNDKYEEKREKAYKSNDSFELNYIQNLLGINVIDKYIERI
NFDIKEICEAYKEMTKNCFEDHDKTKKLQKNIKAVASIKSYLDSLKNIER
DIKLLNGTGLESRNEFFYGEQSTVLEEITKVDELYNITRNYLTKKPFSTE
KMKLNENNPQLLGGWDVNKERDCYGVILIKDNNYYLGIMDKSANKSFLNI
KESKNENAYKKVNCKLLPGPNKMFPKVFFAKSNIDYYDPTHEIKKLYDKG
TFKKGNSFNLEDCHKLIDFYKESIKKNDDWKNFNFNFSDTKDYEDISGEF
REVEAQNYKITYTNVSCDFIESLVDEGKLYLFQIYNKDFSEYATGNLNLH
TLYLKMLFDERNLKDLCIKMNGEAEVEYRPASILDEDKVVHKANQKITNK
NTNSKKKESIFSYDIVKDKRYTVDKFFIHLPITLNYKEQNVSRFNDYIRE
ILKKSKNIRVIGIDRGERNLLYVVVCDSDGSILYQRSINEIVSGSHKTDY
HKLLDNKEKERLSSRRDWKTIENIKDLKAGYMSQVVNEIYNLILKYNAIV
VLEDLNIGEKNGRKKVEKQVYQNFEKALIDKLNYLCIDKTREQLSPSSPG
GVLNAYQLTAKFESFEKIGKQTGCIFYVPAYLTSQIDPTTGFVNLFYQKD
TSKQGLQLFFRKFKKINFDKVASNFEFVFDYNDFTNKAEGTKTNWTISTQ
GTRIAKYRSDDANGKWISRTVHPTDIIKEALNREKINYNDGHDLIDEIVS
IEKSAVLKEIYYGFKLTLQLRNSTLANEEEQEDYIISPVKNSSGNYFDSR
ITSKELPCDADANGAYNIARKGLWALEQIRNSENVSKVKLAISNKEWFEY
TQNNIPSL
>WP_029202018_(modified) hypothetical protein
[Oribacterium sp. NK2B42]
(SEQ ID NO: 115)
MYYDGLTKQYALSKTIRNELVPIGKTLDNIKKNRILEADIKRKSDYEH
VKKLMDMYHKKIINEALDNFKLSVLEDAADIYFNKQNDERDIDAFLKIQD
KLRKEIVEQLKGHTDYSKVGNKDFLGLLKAASTEEDRILIESFDNFYTYF
TSYNKVRSNLYSAEDKSSTVAYRLINENLPKFFDNIKAYRTVRNAGVISG
DMSIVEQDELFEVDTFNHTLTQYGIDTYNHMIGQLNSAINLYNQKMHGAG
SFKKLPKMKELYKQLLTEREEEFIEEYTDDEVLITSVHNYVSYLIDYLNS
DKVESFFDTLRKSDGKEVFIKNDVSKTTMSNILFDNWSTIDDLINHEYDS
APENVKKTKDDKYFEKRQKDLKKNKSYSLSKIAALCRDTTILEKYIRRLV
DDIEKIYTSNNVFSDIVLSKHDRSKKLSKNTNAVQAIKNMLDSIKDFEHD
VMLINGSGQEIKKNLNVYSEQEALAGILRQVDHIYNLTRNYLTKKPFSTE
KIKLNFNRPTFLDGWDKNKEEANLGILLIKDNRYYLGIMNTSSNKAFVNP
PKAISNDIYKKVDYKLLPGPNKMLPKVFFATKNIAYYAPSEELLSKYRKG
THKKGDSFSIDDCRNLIDFFKSSINKNTDWSTFGFNFSDTNSYNDISDFY
REVEKQGYKLSFTDIDACYIKDLVDNNELYLFQIYNKDFSPYSKGKLNLH
TLYFKMLFDQRNLDNVVYKLNGEAEVFYRPASIESDEQIIHKSGQNIKNK
NQKRSNCKKTSTFDYDIVKDRRYCKDKFMLHLPITVNFGTNESGKFNELV
NNAIRADKDVNVIGIDRGERNLLYVVVVDPCGKIIEQISLNTIVDKEYDI
ETDYHQLLDEKEGSRDKARKDWNTIENIKELKEGYLSQVVNIIAKLVLKY
DAIICLEDLNFGFKRGRQKVEKQVYQKFEKMLIDKMNYLVLDKSRKQESP
QKPGGALNALQLTSAFKSFKELGKQTGIIYYVPAYLTSKIDPTTGFANLF
YIKYESVDKARDFFSKFDFIRYNQMDNYFEFGFDYKSFTERASGCKSKWI
ACTNGERIVKYRNSDKNNSFDDKTVILTDEYRSLFDKYLQNYIDEDDLKD
QILQIDSADFYKNLIKLFQLTLQMRNSSSDGKRDYIISPVKNYREEFFCS
EFSDDTFPRDADANGAYNIARKGLWVIKQIRETKSGTKINLAMSNSEWLE
YAQCNLL
>WP_028248456_(modified) hypothetical protein
[Pseudobutyrivibrio ruminis]
(SEQ ID NO: 116)
MYYQNLTKMYPISKTLRNELIPVGKTLENIRKNGILEADIQRKADYEH
VKKLMDNYHKQLINEALQGVHLSDLSDAYDLY
FNLSKEKNSVDAFSKCQDKLRKEIVSLLKNHENFPKIGNKEIIKLLQSL
YDNDTDYKALDSFSNFYTYFSSYNEVRKNLYSDEEKSSTVAYRLINENL
PKFLDNIKAYAIAKKAGVRAEGLSEEDQDCLFIIETFERTLTQDGIDNY
NAAIGKLNTAINLFNQQNKKQEGFRKVPQMKCLYKQILSDREEAFIDEF
SDDEDLITNIESFAENMNVFLNSEIITDFKIALVESDGSLVYIKNDVSK
TSFSNIVFGSWNAIDEKLSDEYDLANSKKKKDEKYYEKRQKELKKNKSY
DLETIIGLFDDNSDVIGKYIEKLESDITAIAEAKNDFDEIVLRKHDKNK
SLRKNTNAVEAIKSYLDTVKDFERDIKLINGSGQEVEKNLVVYAEQENI
LAEIKNVDSLYNMSRNYLTQKPFSTEKFKLNFNRATLLNGWDKNKETDN
LGILFEKDGMYYLGIMNTKANKIFVNIPKATSNDVYHKVNYKLLPGPNK
MLPKVFFAQSNLDYYKPSEELLAKYKAGTHKKGDNFSLEDCHALIDFFK
ASIEKHPDWSSFGFEFSETCTYEDLSGFYREVEKQGYKITYTDVDADYI
TSLVERDELYLFQIYNKDFSPYSKGNLNLHTIYLQMLFDQRNLNNVVYK
LNGEAEVFYRPASINDEEVIIHKAGEEIKNKNSKRAVDKPTSKFGYDII
KDRRYSKDKFMLHIPVTMNFGVDETRRFNDVVNDALRNDEKVRVIGIDR
GERNLLYVVVVDTDGTILEQISLNSIINNEYSIETDYHKLLDEKEGDRD
RARKNWTTIENIKELKEGYLSQVVNVIAKLVLKYNAIICLEDLNFGFKR
GRQKVEKQVYQKFEKMLIDKLNYLVIDKSRKQDKPEEFGGALNALQLTS
KFTSFKDMGKQTGIIYYVPAYLTSKIDPTTGFANLFYVKYENVEKAKEF
FSRFDSISYNNESGYFEFAFDYKKFTDRACGARSQWTVCTYGERIIKFR
NTEKNNSFDDKTIVLSEEFKELFSIYGISYEDGAELKNKIMSVDEADFF
RSLTRLFQQTMQMRNSSNDVTRDYIISPIMNDRGEFFNSEACDASKPKD
ADANGAFNIARKGLWVLEQIRNTPSGDKLNLAMSNAEWLEYAQRNQI
>WP_028830240_(modified) hypothetical protein
[Proteocatella sphenisci]
(SEQ ID NO: 117)
MENFKNLYPINKTLRFELRPYGKTLENFKKSGLLEKDAFKANSRRSM
QAIIDEKFKETIEERLKYTEFSECDLGNMTSKDKKITDKAATNLKKQVIL
SFDDEIFNNYLKPDKNIDALFKNDPSNPVISTFKGFTTYFVNFFEIRKHI
FKGESSGSMAYRIIDENLTTYLNNIEKIKKLPEELKSQLEGIDQIDKLNN
YNEFITQSGITHYNEIIGGISKSENVKIQGINEGINLYCQKNKVKLPRLT
PLYKMILSDRVSNSFVLDTIENDTELIEMISDLINKTEISQDVIMSDIQN
IFIKYKQLGNLPGISYSSIVNAICSDYDNNFGDGKRKKSYENDRKKHLET
NVYSINYISELLTDTDVSSNIKMRYKELEQNYQVCKENFNATNWMNIKNI
KQSEKTNLIKDLLDILKSIQRFYDLFDIVDEDKNPSAEFYTWLSKNAEKL
DFEFNSVYNKSRNYLTRKQYSDKKIKLNFDSPTLAKGWDANKEIDNSTII
MRKENNDRGDYDYFLGIWNKSTPANEKIIPLEDNGLFEKMQYKLYPDPSK
MLPKQFLSKIWKAKHPTTPEFDKKYKEGRHKKGPDFEKEFLHELIDCFKH
GLVNHDEKYQDVFGFNLRNTEDYNSYTEFLEDVERCNYNLSFNKIADTSN
LINDGKLYVFQIWSKDFSIDSKGTKNLNTIYFESLFSEENMIEKMFKLSG
EAEIFYRPASLNYCEDIIKKGHHHAELKDKFDYPIIKDKRYSQDKFFFHV
PMVINYKSEKLNSKSLNNRTNENLGQFTHIIGIDRGERHLIYLTVVDVST
GEIVEQKHLDEIINTDTKGVEHKTHYLNKLEEKSKTRDNERKSWEAIETI
KELKEGYISHVINEIQKLQEKYNALIVMENLNYGFKNSRIKVEKQVYQKF
ETALIKKENYIIDKKDPETYIFIGYQLTNPITTLDKIGNQSGIVLYIPAW
NTSKIDPVTGFVNLLYADDLKYKNQEQAKSFIQKIDNIYFENGEFKFDID
FSKWNNRYSISKTKWTLTSYGTRIQTFRNPQKNNKWDSAEYDLTEEFKLI
LNIDGTLKSQDVETYKKFMSLFKLMLQLRNSVTGTDIDYMISPVTDKTGT
HFDSRENIKNLPADADANGAYNIARKGIMAIENIMNGISDPLKISNEDYL
KYIQNQQE

[1601] Applicants generated vector constructs as shown in FIGS. 40A-L (e.g. PACYC184 fnCpf1 (PY001)) and FIGS. 41A-E (e.g. PaCpf1).

[1602] PAM Challenge Assay for detection of putative PAM sequences for FnCpf1 (FIG. 42): Applicants isolated the Cpf1 loci from Francisella novicida (Fn) (FIG. 43) and transformed it into E. coli. The locus was expressed in E. coli from pACYC184 similar to the experiment described in Sapranauskas et al.

E. coli with pACYC-FnCpf1 locus=Cpf1+
E. coli with empty pACYC184=control

[1603] Applicants transformed Cpf1+ and control E. coli with PAM library plasmids. Two PAM libraries were obtained (FIG. 44). PAM libraries are pUC19 plasmids containing a 31 bp proto-spacer sequence which matches spacer 1 in FnCpf1 locus. PAM left library had a 8 nt degenerate PAM at the 5′ end of the proto-spacer. PAM right library had a 7 nt degenerate PAM at the 3′ end of the proto-spacer. Applicants plated Cpf1+ and control E. coli and harvested all colonies after ˜12 h. Each colony represented a PAM-pUC19 transformation event that did not result in cutting/interference by Cpf1. These PAM-pUC19 plasmids do not carry a recognizable PAM. Applicants determined from sequencing of all colonies which PAM-pUC19 plasmids were no longer present compared to control and these plasmids were identified to contain a recognizable PAM.

[1604] Cloning of pY0001: pY0001 is a pACYC184 backbone (from NEB) with a partial FnCpf1 locus. pY0001 contains the endogenous FnCpf1 locus from 255 bp of the acetyltransferase 3′ sequence to the 4th spacer sequence. Only spacer 1-3 are potentially active since spacer 4 is not longer flanked by direct repeats.

[1605] Applicants PCR amplified the FnCpf1 locus in 3 pieces and cloned into Xba1 & Hind3 cut pACYC184 using Gibson assembly.

[1606] Cpf1 PAM Screen Computational Analysis

After sequencing of the screen DNA, Applicants extracted the regions corresponding to either the left PAM or the right PAM. For each sample, the number of PAMs present in the sequenced library were compared to the number of expected PAMs in the library (4̂8 for the left library, 4̂7 for the right).
The left library showed PAM depletion. To quantify this depletion, Applicants calculated an enrichment ratio. For both conditions (control pACYC or FnCpf1 containing pACYC), Applicants calculated the ratio for each PAM in the library as:

$$ratio = - {log}_{2} \frac{sample + 0.01}{initial library + 0.01}$$

[1607] Applicants determined that plotting the distribution showed little enrichment in the control sample and enrichment in both bioreps. Applicants collected all PAMs above a ratio of 8, and plotted the frequency distributions, revealing a 5′ YYN PAM (FIGS. 45A-E). Applicants confirmed that the PAM is TTN, where N is A/C/G or T.

[1608] Applicants performed RNA-sequencing on Francisella tolerances Cpf1 locus and the RNAseq analysis showed that the CRISPR locus was actively expressed (FIG. 46). A further depiction of the RNAseq analysis of the FnCpf1 locus is shown in FIG. 86. In addition to the Cpf1 and Cas genes, two small non-coding transcripts were highly transcribed, which Applicants surmised were putative tracrRNAs. The CRISPR array is also expressed. Both the putative tracrRNAs and CRISPR array are transcribed in the same direction as the Cpf1 and Cas genes. Here all RNA transcripts identified through the RNAseq experiment are mapped against the locus. Zooming into the Cpf1 CRISPR array Applicants identified many different short transcripts. In this plot, all identified RNA transcripts are mapped against the Cpf1 locus (FIG. 47). After selecting transcripts that are less than 85 nucleotides long, Applicants identified two putative tracrRNAs (FIG. 48). FIG. 49 shows a zoomed in perspective of putative tracrRNA 1 and the CRISPR array. FIG. 50 shows a zoomed in perspective of putative tracrRNA 2. Putative crRNA sequences are indicated in FIG. 51.

[1609] Applicants test for function in mammalian cells using U6 PCR products: spacer (DR-spacer-DR) (in certain aspects spacers may be referred to as crRNA or guide RNA or an analogous term as described in this application) and tracr for other identified Cpf1 loci.

### Example 4

### Further Validation Experiments for FnCpf1

[1610] Applicants confirmed the predicted FnCpf1 PAM is TTN in vivo by using the assay outlined in FIG. 52. Applicants transformed FnCpf1 locus carrying cells and control cells with pUC19 encoding endogenous spacer 1 with 5′ TTN PAM (FIG. 53). Briefly, in the in vivo PAM confirmation assay, 50 μl of competent E. coli with FnCpf1 locus (test strain) or with empty pACYC184 (control strain) were transformed with 10 ng proto-spacer 1 carrying plasmids. Preceding the proto-spacer sequence are predicted PAM sequences (TTC, TTG, TTA and TTT). After transformation cells were diluted 1:2000 and plated on LB agar plates containing ampicillin and chloramphenicol. Only cells with intact proto-spacer plasmid can form colonies. Plates with colonies were imaged ˜14 h after plating and colonies were counted using the ImageJ software.

[1611] Applicants performed Cell Lysate Cleavage Assays to further validate FnCpf1 cleavage. The protocol for the cell lysate cleavage assay is as follows:

[1612] In vitro cleavage reaction. Cleavage buffer: 100 mM HEPES pH 7.5, 500 mM KCl, 25 mM MgCl2, 5 mM DTT, 25% glycerol. The stock may be made without DTT.

[1613] Making Cell Lysate

[1614] Lysis buffer: 20 mM Hepes pH 7.5, 100 mM potassium chloride [KCl], 5 mM magnesium chloride [MgCl₂], 1 mM dithiothreitol [DTT], 5% glycerol, 0.1% Triton X-100, supplemented with 10× Roche Protease Inhibitor cocktail. Concentrated stock of lysis buffer w/o Roche Protease Inhibitor and DTT may be maintained. Keep at −20° C.

[1615] Transfect HEK cells with recommended amount of DNA with Lipofectamine 2000

[1616] 500 ng per 24 well

[1617] 2000 ng per 6 well

[1618] Harvest cells with lysis buffer 24-72 hours post transfection

[1619] Aspirate off media

[1620] Wash gently with DPBS

[1621] Aspirate off DPBS

[1622] Use 50 ul of lysis buffer per 24 well or 250 ul per 6 well

[1623] Let sit on ice for 5 min

[1624] Transfer into Eppendorf tube

[1625] Ice for 15 minutes

[1626] Sonicate at high power, 50% duty cycle for 5-10 min

[1627] Spin down cold at max speed for 20 min

[1628] Transfer supernatant to new tube

[1629] Aliquot in PCR strip tubes, 10 ul per strip and freeze at −80 C

[1630] In Vitro Transcription of Guide RNA

[1631] Kit protocol: Information may be accessed at the website www.neb.com/products/e2030-hiscribe-t7-in-vitro-transcription-kit

Take 100 uM stock oligo
Anneal in 10 ul reaction:
1 ul of T7 “forward” strand=“XRP2649”
1 ul of T7 “reverse” oligo
1 ul TaqB buffer
7 ul water

[1632] Run the PNK PCR program without the 37° C. incubation step (basically heat up to 95° C. for 5 min and do slow cool to 4° C. but not as slow as surveyor anneal). Nanodrop annealed oligos: normalize with water to 500 ng/ul (usually 1000-2000 ng/ul for a 120 nt oligo)

[1633] For T7 transcription follow kit instructions (but cut down size by 4×)

[1634] 10 ul Reaction

1 ul 10× buffer
1 ul T7 transcriptase
0.5 ul rNTP

### 0.5 ul HMW mix

[1635] 1 ul DNA template (annealed)
6 ul water

[1636] Transcribe in 42° C. (preferably thermocycler) for at least 2-3 hours, let run overnight. Yield should be around 1000-2000 ng/ul of RNA. It is normal for white residues to form.

[1637] Preparation of DNA

For pUC19, linearize with HindIII and column purify
[1638] will need 300-400 ng of plasmid per reaction, so cut amount necessary
   For gDNA, amplify wt cell DNA with PCR
[1639] do several PCR reactions, pool and column purify
[1640] concentrate the product so around 100-200 ng/ul

### Keep at −20 C

[1641] 20 ul Reaction

10 ul of lysate (this is pre-aliquoted)
2 ul of cleavage buffer (NEB buffer 3)
1 ul of RNA (directly from above; don't need to purify)
1 ul of DNA (from above)
6 ul of water
Incubate at 37° C. for 1-2 hour (30 min is enough)

[1642] Column purify the reaction

[1643] Run out on a 2% E-gel

[1644] The cell lysate cleavage assay used tracrRNA at positions 1, 2, 3, 4 and 5 as indicated in FIG. 54. Cell Lysate Cleavage Assay (1) (FIG. 55) is a gel indicating the PCR fragment with a TTa PAM and proto-spacer1 sequence incubated in cell lysate. Cell Lysate Cleavage Assay (2) (FIG. 56) is a gel showing the pUC-spacer1 with different PAMs incubated in cell lysate. Cell Lysate Cleavage Assay (3) (FIG. 57) is a gel showing the BasI digestion after incubation in cell lysate. Cell Lysate Cleavage Assay (4) (FIG. 58) is a gel showing digestion results for three putative crRNA sequences.

[1645] Applicants also determined the effect of spacer length on cleavage efficiency. Applicants tested different lengths of spacer against a piece of target DNA containing the target site: 5′-TTAgagaagtcatttaataaggccactgttaaaa-3′ (SEQ ID NO: 119). For this experiment, pUC19 plasmid containing the spacer (5′-TTcgagaagucauuuaauaaggccacuguuaaaa-3′ (SEQ ID NO: 120)) was treated to the following conditions:

| | |
|---|---|
| 2 ul | cell lysate containing Cpf1 |
| 2 ul | pUC19 DNA with spacer (300 ng) |
| 1 ul | crRNA (500 ng) |
| 2 ul | NEBuffer 3 |
| 2 ul | 40 mM DTT |
| 0.3 ul | BsaI |
| 10.7 ul | ddH2O |

[1646] Incubated at 37 C for 30 minutes, followed by treatment with RNase for 5 minutes. Then the reaction was cleaned up using Qiagen PCR Purification Kit and analyzed on 2% Invitrogen E-gel EX. FIG. 59 is a gel showing that crRNAs 1-7 mediated successful cleavage of the target DNA in vitro with FnCpf1, whereas crRNAs 8-13 did not facilitate cleavage of the target DNA.

[1647] Applicants arrived at the minimal Fn Cpf1 locus (FIG. 60) and also elucidated the minimal Cpf1 guide (FIG. 61). Applicants also cleaved a PCR amplicon of the human Emx1 locus (FIG. 81). The EMX amplicon was treated to the following conditions:

| | |
|---|---|
| 2 ul | cell lysate containing Cpf1 |
| 3 ul | pUC19 DNA with spacer (300 ng) |
| 1 ul | crRNA (500 ng) |
| 2 ul | NEBuffer 3 |
| 2 ul | 40 mM DTT |
| 0.3 ul | BsaI |
| 9.7 ul | ddH₂O |

[1648] Incubated at 37° C. for 30 minutes, followed by treatment with RNase for 5 minutes. Then the reaction was cleaned up using Qiagen PCR Purification Kit and analyzed on 2% Invitrogen E-gel EX.

[1649] Applicants further studied the effect of truncation in 5′ DR on cleavage activity (FIG. 82A-B). For this experiment, pUC19 plasmid containing the spacer (5′-TTcgagaagucauuuaauaaggccacuguuaaaa-3′ (SEQ ID NO: 121)) was treated to the following conditions:

| | |
|---|---|
| 2 ul | cell lysate containing Cpf1 |
| 2 ul | pUC19 DNA with spacer (300 ng) |
| 1 ul | crRNA (500 ng) |
| 2 ul | NEBuffer 3 |
| 2 ul | 40 mM DTT |
| 0.3 ul | BsaI |
| 10.7 ul | ddH2O |

[1650] Incubated at 37° C. for 30 minutes, followed by treatment with RNase for 5 minutes. Then the reaction was cleaned up using Qiagen PCR Purification Kit and analyzed on 2% Invitrogen E-gel EX. Applicants determined that crDNA deltaDR5 disrupted the stem loop at the 5′ end and this shows that the stemloop at the 5′ end is essential for cleavage activity (FIG. 82B).

[1651] Applicants investigated the effect of crRNA-DNA target mismatch on cleavage efficiency (FIG. 83). For this experiment, pUC19 plasmid containing the spacer (5′-TTcgagaagucauuuaauaaggccacuguuaaaa-3′ (SEQ ID NO: 122)) was treated to the following conditions:

| | |
|---|---|
| 2 ul | cell lysate containing Cpf1 |
| 2 ul | pUC19 DNA with spacer (300 ng) |
| 1 ul | crRNA (500 ng) |
| 2 ul | NEBuffer 3 |
| 2 ul | 40 mM DTT |
| 0.3 ul | BsaI |
| 10.7 ul | ddH2O |

[1652] Incubated at 37 C for 30 minutes, followed by treatment with RNase for 5 minutes. Then the reaction was cleaned up using Qiagen PCR Purification Kit and analyzed on 2% Invitrogen E-gel EX. Each lane in the gel shown in FIG. 83 consists of Cpf1-containing cell lysate, pUC19 with TTc protospacer, and the corresponding crRNA, indicated as 1-11.

[1653] Applicants studied the FnCpf1p RuvC domain and have identified amino acid mutations that may convert the FnCpf1 effector protein into a nickase, whereby the effector protein has substantially reduced nuclease activity and only one strand of DNA is nicked and/or cleaved. The amino acid positions in the FnCpf1p RuvC domain include but are not limited to D917A, E1006A, E1028A, D1227A, D1255A, N1257A, D917A, E1006A, E1028A, D1227A, D1255A and N1257A. The amino acid positions in AsCpf1 correspond to AsD908A, AsE993A, AsD1263A. The amino acid positions in LbCpf1 correspond to LbD832A

[1654] Applicants have also identified a putative second nuclease domain which is most similar to PD-(D/E)XK nuclease superfamily and HincII endonuclease like. The point mutations to be generated in this putative nuclease domain to substantially reduce nuclease activity include but are not limited to N580A, N584A, T587A, W609A, D610A, K613A, E614A, D616A, K624A, D625A, K627A and Y629A.

[1655] Applicants perform plasmid cleavage experiments with FnCpf1p and sequencing of said plasmids will provide information as to whether the cut site is sticky or blunt. Applicants will elucidate further details on the various domains of FnCpf1p from the crystal structure of this protein in a suitable complex. For optimization of FnCpf1 loci components for activity in human cells, Applicants will try different architectures of crRNAs and try more targets than described herein.

[1656] Applicants cleaved DNA using purified Francisella and Prevotella Cpf1 (FIG. 84). For this experiment, pUC19 plasmid containing the spacer (5′-TTcgagaagucauuuaauaaggccacuguuaaaa-3′ (SEQ ID NO: 123)) was treated to the following conditions:

| | |
|---|---|
| 2 ul | purified protein solution |
| 2 ul | pUC19 DNA with spacer (300 ng) |
| 1 ul | crRNA (500 ng) |
| 2 ul | NEBuffer 3 |
| 2 ul | 40 mM DTT |
| 0.3 ul | BsaI |
| 10.7 ul | ddH2O |

[1657] Incubated at 37° C. for 30 minutes, followed by treatment with RNase for 5 minutes. Then the reaction was cleaned up using Qiagen PCR Purification Kit and analyzed on 2% Invitrogen E-gel EX. Analysis of the gel shown in FIG. 84 indicates that PaCpf1 can work with FnCpf1 crRNA, although the activity is not as high as FnCpf1. Applicants concluded that this makes sense given the stem-loop sequences for PaCpf1 and FnCpf1 are almost identical (only 1 base difference) (see FIGS. 85A-B). This is further highlighted in the mature crRNA sequences for FnCpf1 and PaCpf1 shown in FIGS. 87A-B. In preferred embodiments of the invention, biochemical or in vitro cleavage may not require a tracr sequence for effective function of a Cpf1p CRISPR system. Inclusion of a stem loop or a further optimized stem loop structure is important for cleavage activity.

[1658] DNA cleavage by human codon optimized Francisella novicida FnCpf1p.

[1659] Applicants also showed that FnCpf1p cleaves DNA in human cells. 400 ng human codon optimized FnCpf1p and 100 ng U6::crRNA were transfected per well of HEK293T cells (240,000 cells) in 24 well plates. Five crRNAs comprising spacer sequences of length 20-24 nt based on 5′-ctgatggtccatgtctgttactcg-3′ (SEQ ID NO: 124) (i.e., the first 20, 21, 22, 23, or all 24 nt) were employed. The crRNAs further comprised 20 nt of the 5′ repeat sequence of PaCpf1 at the 5′ of the spacer. Applicants earlier determined that the repeat sequence from PaCpf1 can be recognized by FnCpf1.

[1660] DNA was harvested after ˜60 h and analyzed by SURVEYOR nuclease assay. The SURVEYOR primers for DNMT1 were 5′-ctgggactcaggcgggtcac-3′ (SEQ ID NO: 125) (forward) and 5′-cctcacacaacagcttcatgtcagc-3′ (SEQ ID NO: 126) (reverse). Cleaved DNA fragments coinciding with expected cleavage products of ˜345 bp and ˜261 bp were observed for all five crRNAs (spacer lengths 20-24 nt). (FIG. 88).

### Example 5

### Further Validation Experiments for PaCpf1

[1661] A PAM computational screen was performed for Prevotella albensis Cpf1 (PaCpf1) similar to the screen performed for FnCpf1 as detailed in Example 3. After sequencing of the screen DNA, the regions corresponding to either the left PAM or the right PAM were extracted. For each sample, the number of PAMs present in the sequenced library were compared to the number of expected PAMs in the library (4̂7). The left library showed very slight PAM depletion. To quantify this depletion, an enrichment ratio was calculated. For both conditions (control pACYC or PaCpf1 containing pACYC) the ratio was calculated for each PAM in the library as

$$ratio = - {log}_{2} \frac{sample + 0.01}{initial library + 0.01}$$

[1662] Plotting the distribution shows little enrichment in the control sample and enrichment in both bioreps. All PAMs above a ratio of 4.5 were collected, and the frequency distributions were plotted, revealing a 5′ TTTV PAM, where V is A or C or G (FIG. 62A-E).

[1663] Applicants will elucidate further details on the various domains of PaCpf1p from the crystal structure of this protein in a suitable complex. For optimization of PaCpf1 loci components for activity in human cells, Applicants will work with different crRNA (guideRNA) architectures and different optimized PaCpf1 effector proteins. Applicants have human codon optimized the PaCpf1 sequence as follows:

NLS (underline)
GS linker (bold)
3xHA tag (italics)
(SEQ ID NO: 127)
ATGGCCCCAAAGAAGAAGCGGAAGGTCGGTATCCACGGAGTCCCA
GCAGCCggtagtAACATCAAAAACTTTACCGGGCTCTACCCCCTCAGCA
AAACTTTGCGCTTTGAACTCAAGCCTATTGGCAAAACCAAGGAAAACAT
CGAGAAAAATGGCATCCTGACCAAGGACGAGCAACGGGCTAAAGACTAC
CTCATAGTCAAAGGCTTTATTGACGAGTATCACAAGCAGTTCATCAAAG
ACAGGCTTTGGGACTTTAAATTGCCTCTCGAAAGTGAGGGGGAGAAGAA
CAGTCTCGAAGAATACCAGGAACTGTACGAGCTCACTAAGCGCAACGAT
GCCCAGGAGGCCGACTTCACCGAGATTAAAGATAACCTTCGCAGCTCTA
TTACCGAACAGCTCACGAAGTCTGGATCTGCGTACGATCGGATTTTTAA
AAAAGAGTTCATTAGAGAAGACCTGGTCAACTTCCTCGAAGATGAAAAA
GATAAAAATATCGTGAAACAGTTCGAGGACTTTACTACATATTTTACGG
GTTTTTATGAAAATAGGAAGAACATGTACTCTAGCGAAGAGAAGTCCAC
GGCCATCGCATACCGGCTTATCCATCAGAATCTGCCAAAATTCATGGAC
AACATGAGAAGTTTTGCCAAAATTGCAAATTCCAGTGTTTCCGAGCACT
TTAGCGACATCTATGAAAGCTGGAAGGAATATCTGAATGTAAATAGCAT
CGAGGAAATCTTCCAGCTCGACTATTTTAGCGAAACCTTGACTCAGCCA
CATATTGAGGTGTATAACTATATTATCGGGAAGAAAGTCCTGGAAGACG
GAACCGAGATAAAGGGCATCAACGAGTATGTGAACCTCTACAATCAGCA
GCAGAAAGATAAGAGTAAACGACTGCCTTTCCTGGTGCCACTGTATAAG
CAAATTTTGTCTGATAGGGAAAAACTCTCCTGGATTGCTGAAGAGTTCG
ACAGCGACAAGAAGATGCTGAGCGCTATCACCGAGTCTTACAACCACCT
GCACAACGTGTTGATGGGTAACGAGAACGAAAGCCTGCGAAATCTGCTG
CTGAATATTAAGGACTATAACCTGGAGAAAATTAATATCACAAACGACT
TGTCTCTCACCGAAATCTCCCAGAATCTTTTTGGCCGATATGATGTATT
CACAAATGGGATCAAAAACAAGCTGAGAGTGTTGACTCCAAGGAAGAAA
AAGGAGACGGACGAAAATTTTGAGGACCGCATTAACAAAATTTTTAAGA
CCCAGAAGTCCTTCAGCATCGCTTTTCTGAACAAGCTGCCTCAGCCCGA
AATGGAGGATGGGAAGCCCCGGAACATTGAGGACTATTTCATTACACAG
GGGGCGATTAACACCAAATCTATACAGAAAGAAGATATCTTCGCCCAAA
TTGAGAATGCATACGAGGATGCACAGGTGTTCCTGCAAATTAAGGACAC
CGACAACAAACTTAGCCAGAACAAGACGGCGGTGGAAAAGATCAAAACT
TTGCTGGACGCCTTGAAGGAACTCCAGCACTTCATCAAACCGCTGCTGG
GCTCTGGGGAGGAGAACGAGAAAGACGAACTGTTCTACGGTTCCTTCCT
GGCCATCTGGGACGAACTGGACACCATTACACCACTTTATAACAAAGTG
AGAAATTGGCTGACCCGAAAACCATATTCAACAGAAAAAATCAAATTGA
ATTTCGACAACGCTCAGCTGCTGGGAGGGTGGGATGTCAATAAAGAACA
CGACTGTGCAGGTATCTTGTTGCGGAAAAACGATAGCTACTATCTCGGA
ATTATCAATAAGAAAACCAACCACATCTTTGATACGGATATTACGCCAT
CAGATGGCGAGTGCTATGACAAAATCGACTACAAGCTCCTTCCCGGGGC
GAACAAAATGCTTCCAAAGGTGTTTTTTAGTAAGTCCCGAATCAAAGAG
TTCGAGCCATCAGAGGCCATAATCAATTGCTATAAGAAGGGGACACACA
AAAAAGGAAAAAACTTTAACCTGACGGACTGTCACCGCCTGATCAACTT
TTTTAAGACCTCAATCGAGAAACACGAGGATTGGTCAAAATTCGGATTC
AAGTTCTCCGATACCGAAACGTATGAGGATATTAGCGGTTTTTATAGAG
AGGTCGAGCAGCAGGGATACAGGCTGACGAGCCATCCAGTCAGTGCCAG
CTATATACATAGTCTGGTCAAGGAAGGAAAACTGTACCTCTTCCAAATC
TGGAACAAGGACTTTTCTCAATTCTCCAAGGGGACCCCTAACTTGCACA
CTCTCTATTGGAAGATGCTGTTTGACAAACGGAATCTTAGCGATGTGGT
TTATAAGCTGAATGGCCAGGCTGAAGTGTTCTATAGAAAGAGCTCCATT
GAACACCAGAACCGAATTATCCACCCCGCTCAGCATCCCATCACAAATA
AGAATGAGCTTAACAAAAAGCACACTAGCACCTTCAAATACGATATCAT
CAAAGATCGCAGATACACGGTGGATAAATTCCAGTTCCATGTGCCCATT
ACTATAAATTTTAAGGCGACCGGGCAGAACAACATCAACCCAATCGTCC
AAGAGGTGATTCGCCAAAACGGTATCACCCACATCATAGGCATCGATCG
AGGTGAACGCCATCTTCTGTACCTCTCTCTCATCGATTTGAAAGGCAAC
ATCATCAAGCAGATGACTCTCAACGAAATTATTAATGAGTATAAGGGTG
TGACCTATAAGACCAACTACCATAACCTCCTGGAGAAGAGGGAGAAGGA
GCGGACCGAGGCCAGACACTCCTGGAGTAGTATTGAAAGCATAAAAGAA
CTGAAGGATGGATACATGTCACAGGTGATTCACAAAATTACGGACATGA
TGGTTAAGTACAATGCGATTGTGGTCCTGGAGGACCTCAACGGGGGGTT
TATGCGAGGCCGCCAGAAGGTCGAGAAGCAGGTGTACCAGAAATTTGAA
AAAAAGTTGATCGACAAGCTGAACTATCTCGTTGACAAGAAACTCGACG
CTAACGAGGTCGGCGGAGTACTGAATGCTTATCAGCTGACCAACAAGTT
CGAGTCTTTCAAGAAGATTGGGAAACAAAGCGGATTTTTGTTCTACATC
CCCGCCTGGAACACAAGCAAAATCGATCCTATAACAGGGTTCGTTAATC
TGTTCAACACCAGGTACGAGTCTATCAAGGAGACAAAAGTTTTTTGGTC
TAAGTTTGATATTATCCGATACAATAAAGAGAAGAATTGGTTCGAGTTC
GTCTTCGATTACAATACCTTTACGACTAAAGCGGAGGGAACACGCACTA
AGTGGACTCTGTGCACCCACGGCACTCGCATCCAGACATTCCGGAACCC
AGAAAAGAATGCCCAGTGGGACAATAAAGAGATCAATTTGACTGAGTCC
TTCAAAGCTCTGTTTGAAAAGTACAAGATCGATATCACCAGTAATCTCA
AGGAATCCATCATGCAGGAAACCGAGAAGAAGTTCTTCCAGGAACTGCA
TAATCTGCTCCACCTGACCCTGCAGATGAGGAATAGCGTTACTGGAACC
GACATAGACTATTTGATCAGCCCCGTTGCCGATGAGGATGGAAATTTCT
ATGATAGTCGCATAAATGGCAAAAATTTTCCGGAGAATGCCGATGCCAA
TGGCGCGTACAACATCGCACGAAAGGGTCTGATGCTTATTCGGCAGATC
AAGCAAGCAGATCCACAGAAGAAATTCAAGTTTGAGACAATCACCAATA
AAGACTGGCTGAAATTCGCCCAAGACAAGCCCTATCTTAAAGATggcag
cgggAAAAGGCCGGCGGCCACGAAAAAGGCCGGCCAGGCAAAAAAGAAA
AAGggatccTACCCATACGATGTTCCAGATTACGCTTATCCCTACGACG
TGCCTGATTATGCATACCCATACGATGTCCCCGACTATGCCTAA

[1664] The vector map for human codon optimized PaCpf1 sequence is provided in FIG. 63.

### Example 6

### Cpf1 Orthologs

[1665] Applicants analyzed an expanding pool of Cpf1 orthologs (FIG. 64). Human codon optimized sequences were obtained for several Cpf1 loci components (FIGS. 65-79). Applicants also arrived at the Direct Repeat (DR) sequences for each ortholog and their predicted fold structure (FIG. 80A-I).

[1666] Applicants further study Cpf1 orthologs based on size of the effector protein, i.e. smaller effector proteins allow for easier packaging into vectors and on PAM composition. All aspects allow for further optimization in prokaryotic and eukaryotic cells, preferably for effective activity in mammalian cells, i.e. human cells.

[1667] Applicants showed that the effector protein orthologs of the following loci showed activity in the in vitro cleavage assay: Peregrinibacteria bacterium GW2011_GWA2_33_10 Cpf1, Acidaminococcus sp. BV3L6 Cpf1, Francisalla tularensis 1 Cpf1, Moraxella bovoculi 237 Cpf1, Lachnospiraceae bacterium ND2006 Cpf1, Lachnospiraceaa bacterium MA2020 Cpf1, Porphyromonas macacee Cpf1, Porphyromonas crevlor1canls 3 Cpf1, Prevotella albensis Cpf1 (FIG. 64).

[1668] In the in vitro cleavage assay by orthologs, HEK293 cells expressing Cpf1 orthologs were harvested and the lysate was incubated with predicted mature crRNA targeting an artificial spacer cloned into the pUC19 plasmids. The spacer was preceded by 8 degenerate bases to allow for determination of the PAM via sequencing. The lower bands signify cleavage by the Cpf1 enzyme (FIG. 89).

[1669] Applicants identified computationally derived PAMs from the in vitro cleavage assay (FIG. 90). Uncut DNA from FIG. 89 (the higher band) was excised and amplified for next generation sequencing. The abundance of each 8-mer was calculated and the log ratio compared to the input library was used to quantify enrichment. Individual 8-mers with a log ratio greater than 4 were compiled and used to determine the consensus PAM using Weblogo.

[1670] Applicants further identified that Cpf1p effector proteins cut in a staggered fashion with 5′ overhangs. Purified FnCpf1 protein was harvested and incubated with crRNA and the corresponding target cloned into pUC19. The cleaved product was gel extracted and submitted for Sanger sequencing. The asymmetric reads show that there is a staggered cut (FIG. 91). In a preferred embodiment of the invention, Applicants demonstrate in vivo staggered ligation with a template (e.g. an exogenous template).

[1671] Applicants also determined the effect of spacer length on the cutting ability of the effector protein (FIG. 92). Purified FnCpf1 protein was harvested and incubated with crRNA and the corresponding target cloned into pUC19. Spacer lengths greater than 17 nt cut to completion, while the 17 nt spacer shows reduced activity and spacers less than 17 nt are not active.

[1672] Applicants demonstrated that FnCpf1 mediates indel formation in HEK293T cells.

[1673] ˜280,000 HEK cells/24 well were transfected with 350 ng of huFnCpf1 plasmid and 150 ng U6::crRNA. Cells were harvested three days after transfection and analyzed by SURVEYOR nuclease assay. Uncleaved PCR fragment size is 606 bps. Expected fragment sizes are ˜418 bp and ˜188 bp for crRNA DNMT1-1 and ˜362 bp and ˜244 bp for crRNA DNMT1-3 (FIG. 93).

[1674] DNMT1-1 spacer sequence: cctcactcctgctcggtgaattt (SEQ ID NO: 128)

[1675] DNMT1-3 spacer sequence: ctgatggtccatgtctgttactc (SEQ ID NO: 129)

[1676] Applicants identified the required components of the Cpf1 system to achieve cleavage by determining if transcripts were processed when certain sequences of the locus were deleted (FIG. 94A-F). The deleted sequences may include but are not limited to the Cas1 gene, the Cas2 gene and the tracr. Hence, in a preferred embodiment of the invention, Applicants demonstrated that the tracr is not a required component of a functional Cpf1 system or complex to achieve cleavage.

### Example 7

### Procedures

### Generation of Heterologous Plasmids

[1677] To generate the FnCpf1 locus for heterologous expression, genomic DNA from Francisella Novicida was PCR amplified using Herculase II polymerase (Agilent Technologies) and cloned into pACYC-184 using Gibson cloning (New England Biolabs). Cells harboring plasmids were made competent using the Z-competent kit (Zymo).

### Bacterial RNA-Sequencing

[1678] RNA was isolated from stationary phase bacteria by first resuspending F. novicida (generous gift from David Weiss) or E. coli in TRIzol and then homogenizing the bacteria with zirconia/silica beads (BioSpec Products) in a BeadBeater (BioSpec Products) for 3 one-minute cycles. Total RNA was purified from homogenized samples with the Direct-Zol RNA miniprep protocol (Zymo), DNase treated with TURBO DNase (Life Technologies), and 3′ dephosphorylated with T4 Polynucleotide Kinase (New England Biolabs). rRNA was removed with the bacterial Ribo-Zero rRNA removal kit (Illumina). RNA libraries were prepared from rRNA-depleted RNA using NEBNext® Small RNA Library Prep Set for Illumina (New England Biolabs) and size selected using the Pippin Prep (Sage Science)

[1679] For heterologous E. coli expression of the FnCpf1 locus, RNA sequencing libraries were prepared from rRNA-depleted RNA using a derivative of the previously described CRISPR RNA sequencing method (Heidrich et al., 2015). Briefly, transcripts were poly-A tailed with E. coli Poly(A) Polymerase (New England Biolabs), ligated with 5′ RNA adapters using T4 RNA Ligase 1 (ssRNA Ligase) High Concentration (New England Biolabs), and reverse transcribed with AffinityScript Multiple Temperature Reverse Transcriptase (Agilent Technologies). cDNA was PCR amplified with barcoded primers using Herculase II polymerase (Agilent Technologies) RNA-sequencing analysis

[1680] The prepared cDNA libraries were sequenced on a MiSeq (Illumina). Reads from each sample were identified on the basis of their associated barcode and aligned to the appropriate RefSeq reference genome using BWA (Li and Durbin 2009) Paired-end alignments were used to extract entire transcript sequences using Picard tools (http://broadinstitute.github.io/picard), and these sequences were analyzed using Geneious 8.1.5.

### In Vivo FnCpf1 PAM Screen

[1681] Randomized PAM plasmid libraries were constructed using synthesized oligonucleotides (IDT) consisting of 7 randomized nucleotides either upstream or downstream of the spacer 1 target (Supplementary Table S8). The randomized ssDNA oligos were made double stranded by annealing to a short primer and using the large Klenow fragment (New England Biolabs) for second strand synthesis. The dsDNA product was assembled into a linearized pUC19 using Gibson cloning (New England Biolabs). Competent Stb13 E. coli (Invitrogen) were transformed with the cloned products, and more than 10⁷ cells were collected and pooled. Plasmid DNA was harvested using a Maxi-prep kit (Qiagen). We transformed 360 ng of the pooled library into E. coli cells carrying the FnCpf1 locus or pACYC184 control. After transformation, cells were plated on ampicillin. After 16 hours of growth, >4*10⁶ cells were harvested and plasmid DNA was extracted using a Maxi-prep kit (Qiagen). The target PAM region was amplified and sequenced using a MiSeq (Illumina) with single-end 150 cycles.

### Computational PAM Discovery Pipeline

[1682] PAM regions were extracted, counted, and normalized to total reads for each sample. For a given PAM, enrichment was measured as the log ratio compared to pACYC184 control, with a 0.01 pseudocount adjustment. PAMs above a 3.5 enrichment threshold were collected and used to generate sequence logos (Crooks et al., 2004).

### PAM Validation

[1683] Sequences corresponding to both PAMs non-PAMs were cloned into digested pUC19 and ligated with T4 ligase (Enzymatics). Competent E. coli with either the FnCpf1 locus plasmid or pACYC184 control plasmid were transformed with 20 ng of PAM plasmid and plated on LB agar plates supplemented with ampicillin and chloramphenicol. Colonies were counted after 18 hours.

Synthesis of crRNAs and gRNAs

[1684] All crRNA and gRNAs used in vitro were synthesized using the HiScribe™ T7 High Yield RNA Synthesis Kit (NEB). ssDNA oligos corresponding to the reverse complement of the target RNA sequence were synthesized from IDT and annealed to a short T7 priming sequence. T7 transcription was performed for 4 hours and then RNA was purified using the MEGAclear™ Transcription Clean-Up Kit (Ambion).

### Purification of Cpf1 Protein

[1685] FnCpf1 protein was cloned into a bacterial expression vector (6-His-MBP-TEV-Cpf1, a pET based vector kindly given to Applicants by Doug Daniels) (“6-His” disclosed as SEQ ID NO: 130). Two liters of Terrific Broth growth media with 100 μg/mL ampicillin was inoculated with 10 mL overnight culture Rosetta (DE3) pLyseS (EMD Millipore) cells containing the Cpf1 expression construct. Growth media plus inoculant was grown at 37° C. until the cell density reached 0.2 OD600, then the temperature was decreased to 21° C. Growth was continued until OD600 reached 0.6 when a final concentration of 500 μM IPTG was added to induce MBP-Cpf1 expression. The culture was induced for 14-18 hours before harvesting cells and freezing at −80° C. until purification.

[1686] Cell paste was resuspended in 200 mL of Lysis Buffer (50 mM Hepes pH 7, 2M NaCl, 5 mM MgCl₂, 20 mM imidazole) supplemented with protease inhibitors (Roche cOmplete, EDTA-free) and lysozyme. Once homogenized, cells were lysed by sonication (Branson Sonifier 450) then centrifuged at 10,000 g for 1 hour to clear the lysate. The lysate was filtered through 0.22 micron filters (Millipore, Stericup) and applied to a nickel column (HisTrap FF, 5 mL), washed, and then eluted with a gradient of imidazole. Fractions containing protein of the expected size were pooled, TEV protease (Sigma) was added, and the sample was dialyzed overnight into TEV buffer (500 mM NaCl, 50 mM Hepes pH 7, 5 mM MgCl, 2 mM DTT). After dialysis, TEV cleavage was confirmed by SDS-PAGE, and the sample was concentrated to 500 μL prior to loading on a gel filtration column (HiLoad 16/600 Superdex 200) via FPLC (AKTA Pure). Fractions from gel filtration were analyzed by SDS-PAGE; fractions containing Cpf1 were pooled and concentrated to 200 μL and either used directly for biochemical assays or frozen at −80° C. for storage. Gel filtration standards were run on the same column equilibrated in 2M NaCl, Hepes pH 7.0 to calculate the approximate size of FnCpf1.

### Generation of Cpf1 Protein Lysate

[1687] Cpf1 proteins codon optimized for human expression were synthesized with an N-terminal nuclear localization tag and cloned into the pcDNA3.1 expression plasmid by Genscript. 2000 ng of Cpf1 expression plasmids were transfected into 6-well plates of HEK293FT cells at 90% confluency using Lipofectamine 2000 reagent (Life Technologies). 48 hours later, cells were harvested by washing once with DPBS (Life Technologies) and scraping in lysis buffer [20 mM Hepes pH 7.5, 100 mM KCl, 5 mM MgCl₂, 1 mM DTT, 5% glycerol, 0.1% Triton X-100, 1× cOmplete Protease Inhibitor Cocktail Tablets (Roche)]. Lysate was sonicated for 10 minutes in a Biorupter sonicator (Diagenode) and then centrifuged. Supernatant was frozen for subsequent use in in vitro cleavage assays.

### In Vitro Cleavage Assay

[1688] Cleavage in vitro was performed either with purified protein or mammalian lysate with protein at 37° C. in cleavage buffer (NEBuffer 3, 5 mM DTT) for 20 minutes. The cleavage reaction used 500 ng of synthesized crRNA or sgRNA and 200 ng of target DNA. Target DNA involved either protospacers cloned into pUC19 or PCR amplicons of gene regions from genomic DNA isolated from HEK293 cells. Reactions were cleaned up using PCR purification columns (Qiagen) and run on 2% agarose E-gels (Life Technologies). For native and denaturing gels to analyze cleavage by nuclease mutants, cleaned-up reactions were run on TBE 6% polyacrylamide or TBE-Urea 6% polyacrylamide gels (Life Technologies)

### In Vitro Cpf1-Family Protein PAM Screen

[1689] In vitro cleavage reactions with Cpf1-family proteins were run on 2% agarose E-gels (Life Technologies). Bands corresponding to un-cleaved target were gel extracted using QIAquick Gel Extraction Kit (Qiagen) and the target PAM region was amplified and sequenced using a MiSeq (Illumina) with single-end 150 cycles. Sequencing results were entered into the PAM discovery pipeline.

### Activity of Cpf1 Cleavage in 293FT Cells

[1690] Cpf1 proteins codon optimized for human expression were synthesized with an N-terminal nuclear localization tag and cloned into the pcDNA3.1 CMV expression plasmid by Genscript. PCR amplicons comprised of a U6 promoter driving expression of the crRNA sequence were generated using Herculase II (Agilent Technologies). 400 ng of Cpf1 expression plasmids and 100 ng of the crRNA PCR products were transfected into 24-well plates of HEK293FT cells at 75-90% confluency using Lipofectamine 2000 reagent (Life Technologies). Genomic DNA was harvested using QuickExtract™ DNA Extraction Solution (Epicentre).

### SURVEYOR Nuclease Assay for Genome Modification

[1691] 293FT cells were transfected with 400 ng Cpf1 expression plasmid and 100 ng U6::crRNA PCRfragments using Lipofectamin 2000 reagent (Life Technologies). Cells were incubated at 37° C. for 72 h post-transfection before genomic DNA extraction. Genomic DNA was extracted using the QuickExtract DNA Extraction Solution (Epicentre) following the manufacturer's protocol. The genomic region flanking the CRISPR target site for each gene was PCR amplified, and products were purified using QiaQuick Spin Column (Qiagen) following the manufacturer's protocol. 200-500 ng total of the purified PCR products were mixed with 1 μl 10×Taq DNA Polymerase PCR buffer (Enzymatics) and ultrapure water to a final volume of 10 μl, and subjected to a reannealing process to enable heteroduplex formation: 95° C. for 10 min, 95° C. to 85° C. ramping at −2° C./s, 85° C. to 25° C. at −0.25° C./s, and 25° C. hold for 1 min. After reannealing, products were treated with SURVEYOR nuclease and SURVEYOR enhancer S (Integrated DNA Technologies) following the manufacturer's recommended protocol, and analyzed on 4-20% Novex TBE polyacrylamide gels (Life Technologies). Gels were stained with SYBR Gold DNA stain (Life Technologies) for 10 min and imaged with a Gel Doc gel imaging system (Bio-rad). Quantification was based on relative band intensities. Indel percentage was determined by the formula, 100×(1−(1−(b+c)/(a+b+c))½), where a is the integrated intensity of the undigested PCR product, and b and c are the integrated intensities of each cleavage product.

### Deep Sequencing to Characterize Cpf1 Indel Patterns in 293FT Cells

[1692] HEK293FT cells were transfected and harvested as described for assessing activity of Cpf1 cleavage. The genomic region flanking DNMT1 targets were amplified using a two-round PCR region to add Illumina P5 adapters as well as unique sample-specific barcodes to the target amplicons. PCR products were ran on 2% E-gel (Invitrogen) and gel-extracted using QiaQuick Spin Column (Qiagen) as per the manufacturer's recommended protocol. Samples were pooled and quantified by Qubit 2.0 Fluorometer (Life Technologies). The prepared cDNA libraries were sequenced on a MiSeq (Illumina). Indels were mapped using a Python implementation of the Geneious 6.0.3 Read Mapper.

### Computational Analysis of Cpf1 Loci

[1693] PSI-BLAST program (Altschul et al., 1997) was used to identify Cpf1 homologs in the NCBI NR database using several known Cpf1 sequences as queries with the Cpf1 with the E-value cut-off of 0.01 and low complexity filtering and composition based statistics turned off. The TBLASTN program with the E-value cut-off of 0.01 and low complexity filtering turned off parameters was used to search the NCBI WGS database using the Cpf1 profile Makarova et al., 2015) as the query. Results of all searches were combined. The HHpred program was used with default parameters to identify remote sequence similarity using a subset of representative Cpf1 sequences queries (Soding et al., 2006). Multiple sequence alignment were constructed using MUSCLE (Edgar, 2004) with manual correction based on pairwise alignments obtained using PSI-BLAST and HHpred programs. Phylogenetic analysis was performed using the FastTree program with the WAG evolutionary model and the discrete gamma model with 20 rate categories (Price et al., 2010). Protein secondary structure was predicted using Jpred 4 (Drozdetskiy et al., 2015).

[1694] CRISPR repeats were identified using PILER-CR (Edgar, 2007) and CRISPRfinder (Grissa et al., 2007). The spacer sequences were searched against the NCBI nucleotide NR databases using MEGABLAST (Morgulis et al., 2008) with default parameters except that the word size was set at 20 and E-value cutoff 0.0001.

TABLE 1
Endogenous F. novicida spacer sequences

| Spacer number | Sequence |
|---|---|
| 1 | GAGAAGTCATTTAATAAGGCCACTGTTAAAA |
| | (SEQ ID NO: 131) |
| 2 | GCTACTATTCCTGTGCCTTCAGATAATTCA |
| | (SEQ ID NO: 132) |
| 3 | GTCTAGAGCCTTTTGTATTAGTAGCCG |
| | (SEQ ID NO: 133) |

TABLE 2
ssDNA oligos and primer for generation of
PAM library

| Oligo/primer name | Sequence |
|---|---|
| PAM library 5′ (+) | GGCCAGTGAATTCGAGCTCGGTACCCGGG |
| | NNNNNNNGAGAAGTCATTTAATAAGGC |
| | CACTGTTAAAAAGCTTGGCGTAATCATGG |
| | TCATAGCTGTTT (SEQ ID NO: 134) |
| PAM library 3′ (+) | GGCCAGTGAATTCGAGCTCGGTACCCGGG |
| | GAGAAGTCATTTAATAAGGCCACTGTTAA |
| | AANNNNNNNNAGCTTGGCGTAATCATGG |
| | TCATAGCTGTTT (SEQ ID NO: 135) |
| PAM library (-) | GCTGACATGAAGCTGTTGTGTGAGG |
| | (SEQ ID NO: 136) |

TABLE 3
Primers used for pUC19 sequencing and SURVEYOR
assay

| Primer name | Sequence |
|---|---|
| NGS pUC For | GGCCAGTGAATTCGAGCTCGG |
| | (SEQ ID NO: 137) |
| NGS pUC Rev | CAATTTCACACAGGAAACAGCTATGACC |
| | (SEQ ID NO: 138) |
| Sanger pUC For | CGGGGCTGGCTTAACTATGCG |
| | (SEQ ID NO: 139) |
| Sanger pUC Rev | GCCCAATACGCAAACCGCCT |
| | (SEQ ID NO: 140) |
| EMX1 For | CCATCCCCTTCTGTGAATGT |
| | (SEQ ID NO: 141) |
| EMX1 Rev | TCTCCGTGTCTCCAATCTCC |
| | (SEQ ID NO: 142) |
| DNMT1 For | CTGGGACTCAGGCGGGTCAC |
| | (SEQ ID NO: 143) |
| DNMT1 Rev | GCTGACATGAAGCTGTTGTGTGAGG |
| | (SEQ ID NO: 144) |

TABLE 4
Truncated guides for in vitro cleavage assay

| Truncated | |
|---|---|
| guide number | Sequence |
| 1 | GAGAAGTCATTTAATAAGGCCACT |
| | (SEQ ID NO: 145) |
| 2 | GAGAAGTCATTTAATAAGGCCA |
| | (SEQ ID NO: 146) |
| 3 | GAGAAGTCATTTAATAAGGC |
| | (SEQ ID NO: 147) |
| 4 | GAGAAGTCATTTAATAAG |
| | (SEQ ID NO: 148) |
| 5 | GAGAAGTCATTTAATAA |
| | (SEQ ID NO: 149) |
| 6 | GAGAAGTCATTTAATA (SEQ ID NO: 150) |

TABLE 5
Mismatched guides for in vitro cleavage assay

| Mismatched | |
|---|---|
| guide number | Sequence |
| 1 | GATAAGTCATTTAATAAGGCCACT |
| | (SEQ ID NO: 151) |
| 2 | GAGAAGGCATTTAATAAGGCCACT |
| | (SEQ ID NO: 152) |
| 3 | GAGAAGTCATGTAATAAGGCCACT |
| | (SEQ ID NO: 153) |
| 4 | GAGAAGTCATTTAAGAAGGCCACT |
| | (SEQ ID NO: 154) |
| 5 | GAGAAGTCATTTAATAAGTCCACT |
| | (SEQ ID NO: 155) |
| 6 | GAGAAGTCATTTAATAAGGCCAAT |
| | (SEQ ID NO: 156) |

TABLE 6
Truncated direct repeat guides for in vitro
cleavage assay

| Direct | |
|---|---|
| repeat length | Sequence |
| +18 | ATTTCTACTGTTGTAGATGAGAAGTCATTTAAT |
| | AAGGCCACT (SEQ ID NO: 157) |
| +17 | TTTCTACTGTTGTAGATGAGAAGTCATTTAATA |
| | AGGCCACT (SEQ ID NO: 158) |
| +16 | TTCTACTGTTGTAGATGAGAAGTCATTTAATAA |
| | GGCCACT (SEQ ID NO: 159) |
| +15 | TCTACTGTTGTAGATGAGAAGTCATTTAATAAG |
| | GCCACT (SEQ ID NO: 160) |
| +11 | CTGTTGTAGATGAGAAGTCATTTAATAAGGCCA |
| | CT (SEQ ID NO: 161) |
| +7 | TGTAGATGAGAAGTCATTTAATAAGGCCACT |
| | (SEQ ID NO: 162) |

TABLE 7
Direct repeat stem mutations for in vitro
cleavage assay

| Direct repeat | |
|---|---|
| stem mutant number | Sequence |
| 1 | AATTTCTGCTGTTGCAGAT |
| | (SEQ ID NO: 163) |
| 2 | AATTTCCACTGTTGTGGAT |
| | (SEQ ID NO: 164) |
| 3 | AATTCCTACTGTTGTAGGT |
| | (SEQ ID NO: 165) |
| 4 | AATTTATACTGTTGTAGAT |
| | (SEQ ID NO: 166) |
| 5 | AATTTCGACTGTTGTAGAT |
| | AATTTCGACTGTTGTAGAT |
| | (SEQ ID NO: 167) |
| 6 | AATTTCTAGTGTTGTAGAT |
| | (SEQ ID NO: 168) |

TABLE 8
Direct repeat loop mutations for in vitro
cleavage assay

| Direct repeat | |
|---|---|
| loop mutant number | Sequence |
| 1 | AATTTCTACTATTGTAGAT |
| | (SEQ ID NO: 169) |
| 2 | AATTTCTACTGCTGTAGAT |
| | (SEQ ID NO: 170) |
| 3 | AATTTCTACTTTGTAGAT |
| | (SEQ ID NO: 171) |
| 4 | AATTTCTACTTGTAGAT |
| | (SEQ ID NO: 172) |
| 5 | AATTTCTACTTTTGTAGAA |
| | (SEQ ID NO: 173) |
| 6 | AATTTCTACTTTTGTAGAC |
| | (SEQ ID NO: 174) |

TABLE 9
Ortholog specific DNMT1 targeting guides for mammalian cells

| Nuclease | Name | 5′ Direct Repeat | Sequence |
|---|---|---|---|
| AsCpf1 | DNMT1 target 1 | 5′ Direct Repeat | Sequence |
| AsCpf1 | DNMT1 target 2 | TAATTTCTACTGTTGTAGAT | CCTCACTCCTGC |
| | | (SEQ ID NO: 175) | TCGGTGAATTT |
| | | | (SEQ ID NO: 176) |
| AsCpf1 | DNMT1 target 3 | TAATTTCTACTGTTGTAGAT | AGGAGTGTTCAG |
| | | (SEQ ID NO: 177) | TCTCCGTGAAC |
| | | | (SEQ ID NO: 178) |
| AsCpf1 | DNMT1 target 4 | TAATTTCTACTGTTGTAGAT | CTGATGGTCCAT |
| | | (SEQ ID NO: 179) | GTCTGTTACTC |
| | | | (SEQ ID NO: 180) |
| Lb3Cpf1 | DNMT1 target 1 | TAATTTCTACTGTTGTAGAT | TTTCCCTTCAGCT |
| | | (SEQ ID NO: 181) | AAAATAAAGG |
| | | | (SEQ ID NO: 182) |
| Lb3Cpf1 | DNMT1 target 2 | TAATTTCTACTAAGTGTAGAT | CCTCACTCCTGC |
| | | (SEQ ID NO: 183) | TCGGTGAATTT |
| | | | (SEQ ID NO: 184) |
| Lb3Cpf1 | DNMT1 target 3 | TAATTTCTACTAAGTGTAGAT | AGGAGTGTTCAG |
| | | (SEQ ID NO: 185) | TCTCCGTGAAC |
| | | | (SEQ ID NO: 186) |
| Lb3Cpf1 | DNMT1 target 4 | TAATTTCTACTAAGTGTAGAT | CTGATGGTCCAT |
| | | (SEQ ID NO: 187) | GTCTGTTACTC |
| | | | (SEQ ID NO: 188) |
| SpCas9 | DNMT1 target 1 | TAATTTCTACTAAGTGTAGAT | TTTCCCTTCAGCT |
| | | (SEQ ID NO: 189) | AAAATAAAGG |
| | | | (SEQ ID NO: 190) |
| SpCas9 | DNMT1 target 2 | na | TCACTCCTGCTC |
| | | | GGTGAATT (SEQ |
| | | | ID NO: 191) |
| SpCas9 | DNMT1 target 3 | na | AACCCTCTGGGG |
| | | | ACCGTTTG (SEQ |
| | | | ID NO: 192) |
| SpCas9 | DNMT1 target 4 | na | AGTACGTTAATG |
| | | | TTTCCTGA (SEQ |
| | | | ID NO: 193) |

TABLE 10
Ortholog specific direct repeats for crRNAs
targeting proto-spacer 1 and DNMT1 target 3

| Direct | |
|---|---|
| repeat | |
| origin | Sequence |
| FnCpf1 | TAATTTCTACTGTTGTAGAT (SEQ ID NO: 195) |
| Lb1Cpf1 | AGAAATGCATGGTTCTCATGC (SEQ ID NO: 196) |
| BpCpf1 | AAAATTACCTAGTAATTAGGT (SEQ ID NO: 197) |
| PeCpf1 | GGATTTCTACTTTTGTAGAT (SEQ ID NO: 198) |
| PbCpf1 | AAATTTCTACTTTTGTAGAT (SEQ ID NO: 199) |
| SsCpf1 | CGCGCCCACGCGGGGCGCGAC (SEQ ID NO: 200) |
| AsCpf1 | TAATTTCTACTCTTGTAGAT (SEQ ID NO: 201) |
| Lb2Cpf1 | GAATTTCTACTATTGTAGAT (SEQ ID NO: 202) |
| CMtCpf1 | GAATCTCTACTCTTTGTAGAT (SEQ ID NO: 203) |
| EeCpf1 | TAATTTCTACTTTGTAGAT (SEQ ID NO: 204) |
| MbCpf1 | AAATTTCTACTGTTTGTAGAT (SEQ ID NO: 205) |
| LiCpf1 | GAATTTCTACTTTTGTAGAT (SEQ ID NO: 206) |
| Lb3Cpf1 | TAATTTCTACTAAGTGTAGAT (SEQ ID NO: 207) |
| PcCpf1 | TAATTTCTACTATTGTAGAT (SEQ ID NO: 208) |
| PdCpf1 | TAATTTCTACTTCGGTAGAT (SEQ ID NO: 209) |
| PmCpf1 | TAATTTCTACTATTGTAGAT (SEQ ID NO: 210) |

### Example 8

### Cloning of Francisella tularensis Subsp. Novicida U112 Cpf1 (FnCpf1)

[1695] Applicants cloned the Francisella tularensis subsp. novicida U112 (FIG. 95A) Cpf1 (FnCpf1) locus into low-copy plasmids (pFnCpf1) to allow heterologous reconstitution in Escherichia coli. Typically, in currently characterized CRISPR-Cas systems, there are two requirements for DNA interference: (i) the target sequence has to match one of the spacers present in the respective CRISPR array, and (ii) the target sequence complementary to the spacer (hereinafter protospacer) has to be flanked by the appropriate Protospacer-Adjacent Motif (PAM). Given the completely uncharacterized functionality of the FnCpf1 CRISPR locus, a plasmid depletion assay was designed to ascertain the activity of Cpf1 and identify PAM sequence and its respective location relative to the protospacer (5′ or 3′) (FIG. 95B). Two libraries of plasmids carrying a protospacer matching the first spacer in the FnCpf1 CRISPR array were constructed with the 5′ or 3′ 7 bp sequences randomized. Each plasmid library was transformed into E. coli that heterologously expressed the FnCpf1 locus or into a control E. coli strain carrying the empty vector. Using this assay, the PAM sequence and location was determined by identifying nucleotide motifs that are preferentially depleted in cells heterologously expressing the FnCpf1 locus. The PAM for FnCpf1 was found to be located upstream of the 5′ end of displaced strand of the protospacer and has the sequence 5′-TTN (FIGS. 95C-D and 102). The 5′ location of the PAM is also observed in type I CRISPR systems, but not in type II systems, where Cas9 employs PAM sequences that are on the 3′ end of the protospacer (Mojica et al., 2009; Garneau et al., 2010). Beyond the identification of the PAM, the results of the depletion assay clearly indicate that heterologously expressed Cpf1 loci are capable of efficient interference with plasmid DNA.

[1696] To further characterize the PAM, plasmid interference activity was analyzed by transforming cpf1-locus expressing cells with plasmids carrying protospacer 1 flanked by 5′-TTN PAMs. All 5′-TTN PAMs were efficiently targeted (FIG. 1E). In addition, 5′-CTA but not 5′-TCA was also efficiently targeted (FIG. 95E), suggesting that the middle T is more critical for PAM recognition than the first T and that, in agreement with the sequence motifs depleted in the PAM discovery assay (FIG. 102D), the PAM might be more relaxed than 5′-TTN.

### Example 9

### The Cpf1 CRISPR Array is Processed Independent of tracrRNA

[1697] Small RNAseq was used to determine the exact identity of the crRNA produced by the cpf1-based CRISPR loci. By sequencing small RNAs extracted from a Francisella tularensis subsp. novicida U112 culture, it was found that the CRISPR array is processed into short mature crRNAs of 42-44 nt in length. Each mature crRNA begins with 19 nt of the direct repeat followed by 23-25 nt of the spacer sequence (FIG. 96A). This crRNA arrangement contrasts with that in type II CRISPR-Cas systems where the mature crRNA begins with 20-24 nt of spacer sequence followed by ˜22 nt of direct repeat (Deltcheva et al., 2011; Chylinski et al., 2013). Unexpectedly, apart from the crRNAs, we did not observe any robustly expressed small transcripts near the Francisella cpf1 locus that might correspond to tracrRNAs, which are associated with Cas9-based systems.

[1698] To confirm that no additional RNAs are required for crRNA maturation and DNA interference, an expression plasmid was constructed using synthetic promoters to drive the expression of Francisella cpf1 (FnCpf1) and the CRISPR array (pFnCpf1 min). Small RNAseq of E. coli expressing this plasmid still showed robust processing of the CRISPR array into mature crRNA (FIG. 96B), indicating that FnCpf1 and its CRISPR array are sufficient to achieve crRNA processing. Furthermore, E. coli expressing pFnCpf1 min as well as pFnCpf1_ΔCas, a plasmid with all of the cas genes removed but retaining native promoters driving the expression of FnCpf1 and the CRISPR array, also exhibited robust DNA interference, demonstrating that FnCpf1 and crRNA are sufficient for mediating DNA targeting (FIG. 96C). By contrast, Cas9 requires both crRNA and tracrRNA to mediate targeted DNA interference (Deltcheva et al., 2011; Zhang et al., 2013).

### Example 10

### Cpf1 is a Single crRNA-Guided Endonuclease

[1699] The finding that FnCpf1 can mediate DNA interference with crRNA alone is highly surprising given that Cas9 recognizes crRNA through the duplex structure between crRNA and tracrRNA (Jinek et al., 2012; Nishimasu et al., 2014), as well as the 3′ secondary structure of the tracrRNA (Hsu et al., 2013; Nishimasu et al. 2014). To ensure that crRNA is indeed sufficient for forming an active complex with FnCpf1 and mediating RNA-guided DNA cleavage, FnCpf1 supplied only with crRNA was tested for target DNA cleavage in vitro. Purified FnCpf1 (FIG. 103) was assayed for its ability to cleave the same protospacer 1-containing plasmid used in the bacterial DNA interference experiments (FIG. 97A). FnCpf1 with an in vitro transcribed mature crRNA targeting protospacer 1 was able to efficiently cleave the target plasmid in a Mg²⁺- and crRNA-dependent manner (FIG. 97B). Moreover, FnCpf1 was able to cleave both supercoiled and linear target DNA (FIG. 97C). These results clearly demonstrate the sufficiency of FnCpf1 and crRNA for RNA-guided DNA cleavage.

[1700] The cleavage site of FnCpf1 was also mapped using Sanger sequencing of the cleaved DNA ends. FnCpf1-mediated cleavage results in a 5-nt 5′ overhang (FIGS. 97A, 97D, and 104), which is distinct from the blunt cleavage product generated by Cas9 (Garneau et al., 2010; Jinek et al., 2012; Gasiunas et al., 2012). The staggered cleavage site of FnCpf1 is distant from the PAM: cleavage occurs after the 18th base on the non-targeted (+) strand and after the 23rd base on the targeted (−) strand (FIGS. 97A, 97D, and 104). Using double-stranded oligo substrates with different PAM sequences, we also found that FnCpf1 cleave the target DNA when the 5′-TTN PAM to be in a duplex form (FIG. 97E), in contrast to the PAMs of Cas9 (Sternberg et al., 2014).

### Example 11

### The RuvC-Like Domain of Cpf1 Mediates RNA-Guided DNA Cleavage

[1701] The RuvC-like domain of Cpf1 retains all the catalytic residues of this family of endonucleases (FIGS. 98A and 105) and is thus predicted to be an active nuclease. Three mutants, FnCpf1(D917A), FnCpf1(E1006A), and FnCpf1(D1225A) (FIG. 98A) were generated to test whether the conserved catalytic residues are essential for the nuclease activity of FnCpf1. The D917A and E1006A mutations completely inactivated the DNA cleavage activity of FnCpf1, and D1255A significantly reduced nucleolytic activity (FIG. 98B). These results are in contrast to the mutagenesis results for Streptococcus pyogenes Cas9 (SpCas9), where mutation of the RuvC (D10A) and HNH (N863A) nuclease domains converts SpCas9 into a DNA nickase (i.e. inactivation of each of the two nuclease domains abolished the cleavage of one of the DNA strands) (Jinek et al., 2012; Gasiunas et 2012) (FIG. 98B). These findings suggest that the RuvC-like domain of FnCpf1 cleaves both strands of the target DNA, perhaps in a dimeric configuration (FIG. 103B).

### Example 12

### Sequence and Structure of the Cpf1 crRNA

[1702] Compared with the guide RNA for Cas9, which has elaborate RNA secondary structure features that interact with Cas9 (Nishimasu et al., 2014), the guide RNA for FnCpf1 is notably simpler and only comprises a single stem loop in the direct repeat sequence (FIG. 97A).

[1703] The sequence and structural requirements of crRNA for mediating DNA cleavage with FnCpf1 were explored. The length of the guide sequence was examined. A 16 nt guide sequence was observed to achieve detectable DNA cleavage and guide sequences of 18 nt achieved efficient DNA cleavage in vitro (FIG. 99A). These lengths are similar to those demonstrated for SpCas9 where a 16 to 17 nt spacer sequence is sufficient for DNA cleavage (Cencic et al., 2014; Fu et al., 2014). The seed region of the FnCpf1 guide RNA was observed within the first 6 or 7 nt on the 5′ end of the spacer sequence (FIG. 99B).

[1704] The effect of direct repeat mutations on the RNA-guided DNA cleavage activity was investigated. The direct repeat portion of mature crRNA is 19 nt long (FIG. 96A). Truncation of the direct repeat revealed that 16 nt is sufficient, but optimally more than 17 nt of the direct repeat is effective for cleavage. Mutations in the stem loop that preserved the RNA duplex did not affect the cleavage activity, whereas mutations that disrupted the stem loop duplex structure abolished cleavage (FIG. 99D). Finally, base substitutions in the loop region did not affect nuclease activity, whereas substitution of the U immediately 5′ of the spacer sequence reduced activity substantially (FIG. 5E). Collectively, these results suggest that FnCpf1 recognizes the crRNA through a combination of sequence-specific and structural features of the stem loop.

### Example 13

### Cpf1-Family Proteins from Diverse Bacteria Share Common crRNA Structures and PAMs

[1705] To investigate the use of Cpf1 as a genome editing tool, the diversity of Cpf1-family proteins available in the public sequences databases was exploited. A BLAST search of the WGS database at the NCBI revealed 46 non-redundant Cpf1-family proteins (FIG. 64). 16 were chosen based on our phylogenetic reconstruction (FIG. 64), as representative of Cpf1 diversity (FIGS. 100A-100B and 106). These Cpf1-family proteins span a range of lengths between ˜1200 and ˜1500 amino acids.

[1706] The direct repeat sequences for each of these Cpf1-family proteins show strong conservation in the 19 nucleotides at the 3′ of the direct repeat, the portion of the repeat that is included in the processed crRNA (FIG. 100C). The 5′ sequence of the direct repeat is much more diverse. Of the 16 Cpf1-family proteins chosen for analysis, three (2—Lachnospiraceae bacterium MC2017, Lb3Cpf1; 3—Butyrivibrio proteoclasticus, BpCpf1; and 6—Smithella sp. SC_K08D17, SsCpf1) were associated with direct repeat sequences that are notably divergent from the FnCpf1 direct repeat (FIG. 100C). Notably, these direct repeat sequences preserved stem loop structures that were identical or nearly-identical to the FnCpf1 direct repeat (FIG. 100D).

[1707] Orthologous direct repeat sequences are tested for the ability to support FnCpf1 nuclease activity in vitro. Direct repeats that contained conserved stem sequences were able to function interchangeably with FnCpf1. The direct repeat from candidate 3 (BpCpf1) supported a low level of FnCpf1 nuclease activity (FIG. 100E), possibly due to the conservation of the 3′-most U.

[1708] An in vitro PAM identification assay (FIG. 107A) was used to determine the PAM sequence for each Cpf1-family protein. PAM sequences were identified for 7 new Cpf1-family proteins (FIGS. 100E and 107B-C), and the screen confirmed the PAM for FnCpf1 as 5′-TTN. The PAM sequences for the Cpf1-family proteins were predominantly T-rich, varying primarily in the number of Ts constituting each PAM (FIGS. 100F and 107B-C).

### Example 14

### Cpf1 can be Harnessed to Facilitate Genome Editing in Human Cells

[1709] Cpf1-family proteins were codon optimized and attached a C-terminal nuclear localization signal (NLS) for optimal expression and nuclear targeting in human cells (FIG. 101A). To test the activity of each Cpf1-family protein, a guide RNA target site was selected within the DNMT1 gene (FIG. 101B). Each of the Cpf1-family proteins along with its respective crRNA designed to target DNMT1 was able to cleave a PCR amplicon of the DNMT1 genomic region in vitro (FIG. 101C). When tested in human embryonic kidney 293FT (HEK 293FT) cells, 2 of the Cpf1-family proteins (7—AsCpf1 and 13—LbCpf1) exhibited detectable levels of nuclease-induced indels under the conditions employed (FIGS. 101C and D).

[1710] Each Cpf1-family protein was tested with additional genomic targets. AsCpf1 and LbCpf1 consistently mediated robust genome editing in HEK293FT cells (FIGS. 101E and 108). When compared to Cas9, AsCpf1 and LbCpf1 mediated comparable levels of indel formation (FIG. 101E). Additionally, we used in vitro cleavage followed by Sanger sequencing of the cleaved DNA ends and found that 7—AsCpf1 and 13—LbCpf1 also generated staggered cleavage sites (FIGS. 101D and 107E).

[1711] Following are nucleotide and amino acid sequences of FnCpf1 constructs and orthologs:

FnCpf1 locus sequences
pFnCpf1
5′end of endogenous F. novicida acetyltransferase
(upstream of FnCpf1 locus)
FnCpf1

[chemical structure]

Cas2
Direct repeats

[chemical structure]

(SEQ ID NO: 211)
CATCAAGGAATTGGTTCTAAGCTTATAGAAGCAATGATTAAGGAAGCCA
AAAAAAATAATATTGATGCAATATTTGTCTTAGGTCATCCAAGTTATTATCCAAAATTT
GGTTTTAAACCAGCCACAGAATATCAGATAAAATGTGAATATGATGTCCCAGCGGAT
GTTTTTATGGTACTAGATTTGTCAGCTAAACTAGCTAGTTTAAAAGGACAAACTGTCT
ACTATGCCGATGAGTTTGGCAAAATTTTTTAGATCTACAAAATTATAAACTAAAT
AAAGATTCTTATAATAACTTTATATATAATCGAAATGTAGAGAATTTTATAAG
GAGTCTTTATCATGTCAATTTATCAAGAATTTGTTAATAAATATAGTTTAAGT
AAAACTCTAAGATTTGAGTTAATCCCACAGGGTAAAACACTTGAAAACATAA
AAGCAAGAGGTTTGATTTTAGATGATGAGAAAAGAGCTAAAGACTACAAAA
AGGCTAAACAAATAATTGATAAATATCATCAGTTTTTTATAGAGGAGATATT
AAGTTCGGTTTGTATTAGCGAAGATTTATTACAAAACTATTCTGATGTTTATT
TTAAACTTAAAAAGAGTGATGATGATAATCTACAAAAAGATTTTAAAAGTGC
AAAAGATACGATAAAGAAACAAATATCTGAATATATAAAGGACTCAGAGAA
ATTTAAGAATTTGTTTAATCAAAACCTTATCGATGCTAAAAAAGGGCAAGAG
TCAGATTTAATTCTATGGCTAAAGCAATCTAAGGATAATGGTATAGAACTATT
TAAAGCCAATAGTGATATCACAGATATAGATGAGGCGTTAGAAATAATCAAA
TCTTTTAAAGGTTGGACAACTTATTTTAAGGGTTTTCATGAAAATAGAAAAAA
TGTTTATAGTAGCAATGATATTCCTACATCTATTATTTATAGGATAGTAGATG
ATAATTTGCCTAAATTTCTAGAAAATAAAGCTAAGTATGAGAGTTTAAAAGA
CAAAGCTCCAGAAGCTATAAACTATGAACAAATTAAAAAAGATTTGGCAGAA
GAGCTAACCTTTGATATTGACTACAAAACATCTGAAGTTAATCAAAGAGTTTT
TTCACTTGATGAAGTTTTTGAGATAGCAAACTTTAATAATTATCTAAATCAAA
GTGGTATTACTAAATTTAATACTATTATTGGTGGTAAATTTGTAAATGGTGAA
AATACAAAGAGAAAAGGTATAAATGAATATATAAATCTATACTCACAGCAAA
TAAATGATAAAACACTCAAAAAATATAAAATGAGTGTTTTATTTAAGCAAAT
TTTAAGTGATACAGAATCTAAATCTTTTGTAATTGATAAGTTAGAAGATGATA
GTGATGTAGTTACAACGATGCAAAGTTTTTATGAGCAAATAGCAGCTTTTAA
AACAGTAGAAGAAAAATCTATTAAAGAAACACTATCTTTATTATTTGATGATT
TAAAAGCTCAAAAACTTGATTTGAGTAAAATTTATTTTAAAAATGATAAATCT
CTTACTGATCTATCACAACAAGTTTTTGATGATTATAGTGTTATTGGTACAGC
GGTACTAGAATATATAACTCAACAAATAGCACCTAAAAATCTTGATAACCCT
AGTAAGAAAGAGCAAGAATTAATAGCCAAAAAACTGAAAAAGCAAAATAC
TTATCTCTAGAAACTATAAAGCTTGCCTTAGAAGAATTTAATAAGCATAGAG
ATATAGATAAACAGTGTAGGTTTGAAGAAATACTTGCAAACTTTGCGGCTAT
TCCGATGATATTTGATGAAATAGCTCAAAACAAAGACAATTTGGCACAGATA
TCTATCAAATATCAAAATCAAGGTAAAAAAGACCTACTTCAAGCTAGTGCGG
AAGATGATGTTAAAGCTATCAAGGATCTTTTAGATCAAACTAATAATCTCTTA
CATAAACTAAAAATATTTCATATTAGTCAGTCAGAAGATAAGGCAAATATTT
TAGACAAGGATGAGCATTTTTATCTAGTATTTGAGGAGTGCTACTTTGAGCTA
GCGAATATAGTGCCTCTTTATAACAAAATTAGAAACTATATAACTCAAAAGC
CATATAGTGATGAGAAATTTAAGCTCAATTTTGAGAACTCGACTTTGGCTAAT
GGTTGGGATAAAAATAAAGAGCCTGACAATACGGCAATTTTATTTATCAAAG
ATGATAAATATTATCTGGGTGTGATGAATAAGAAAAATAACAAAATATTTGA
TGATAAAGCTATCAAAGAAAATAAAGGCGAGGGTTATAAAAAAATTGTTTAT
AAACTTTTACCTGGCGCAAATAAAATGTTACCTAAGGTTTTCTTTTCTGCTAA
ATCTATAAAATTTTATAATCCTAGTGAAGATATACTTAGAATAAGAAATCATT
CCACACATACAAAAAATGGTAGTCCTCAAAAAGGATATGAAAAATTTGAGTT
TAATATTGAAGATTGCCGAAAATTTATAGATTTTTATAAACAGTCTATAAGTA
AGCATCCGGAGTGGAAAGATTTTGGATTTAGATTTTCTGATACTCAAAGATAT
AATTCTATAGATGAATTTTATAGAGAAGTTGAAAATCAAGGCTACAAACTAA
CTTTTGAAAATATATCAGAGAGCTATATTGATAGCGTAGTTAATCAGGGTAA
ATTGTACCTATTCCAAATCTATAATAAAGATTTTTCAGCTTATAGCAAAGGGC
GACCAAATCTACATACTTTATATTGGAAAGCGCTGTTTGATGAGAGAAATCTT
CAAGATGTGGTTTATAAGCTAAATGGTGAGGCAGAGCTTTTTTATCGTAAAC
AATCAATACCTAAAAAAATCACTCACCCAGCTAAAGAGGCAATAGCTAATAA
AAACAAAGATAATCCTAAAAAGAGAGTGTTTTTGAATATGATTTAATCAAA
GATAAACGCTTTACTGAAGATAAGTTTTTCTTTCACTGTCCTATTACAATCAA
TTTTAAATCTAGTGGAGCTAATAAGTTTAATGATGAAATCAATTTATTGCTAA
AAGAAAAAGCAAATGATGTTCATATATTAAGTATAGATAGAGGTGAAAGAC
ATTTAGCTTACTATACTTTGGTAGATGGTAAAGGCAATATCATCAAACAAGAT
ACTTTCAACATCATTGGTAATGATAGAATGAAAACAAACTACCATGATAAGC
TTGCTGCAATAGAGAAAGATAGGGATTCAGCTAGGAAAGACTGGAAAAAGA
TAAATAACATCAAAGAGATGAAAGAGGGCTATCTATCTCAGGTAGTTCATGA
AATAGCTAAGCTAGTTATAGAGTATAATGCTATTGTGGTTTTTGAGGATTTAA
ATTTTGGATTTAAAAGAGGGCGTTTCAAGGTAGAGAAGCAGGTCTATCAAAA
GTTAGAAAAAATGCTAATTGAGAAACTAAACTATCTAGTTTTCAAAGATAAT
GAGTTTGATAAAACTGGGGGAGTGCTTAGAGCTTATCAGCTAACAGCACCTT
TTGAGACTTTTAAAAAGATGGGTAAACAAACAGGTATATCTACTATGTACC
AGCTGGTTTTACTTCAAAAATTTGTCCTGTAACTGGTTTTGTAAATCAGTTAT
ATCCTAAGTATGAAAGTGTCAGCAAATCTCAAGAGTTCTTTAGTAAGTTTGAC
AAGATTTGTTATAACCTTGATAAGGGCTATTTTGAGTTTAGTTTTGATTATAA
AAACTTTGGTGACAAGGCTGCCAAAGGCAAGTGGACTATAGCTAGCTTTGGG
AGTAGATTGATTAACTTTAGAAATTCAGATAAAAATCATAATTGGGATACTC
GAGAAGTTTATCCAACTAAAGAGTTGGAGAAATTGCTAAAAGATTATTCTAT
CGAATATGGGCATGGCGAATGTATCAAAGCAGCTATTTGCGGTGAGAGCGAC
AAAAAGTTTTTTGCTAAGCTAACTAGTGTCCTAAATACTATCTTACAAATGCG
TAACTCAAAAACAGGTACTGAGTTAGATTATCTAATTTCACCAGTAGCAGAT
GTAAATGGCAATTTCTTTGATTCGCGACAGGCGCCAAAAAATATGCCTCAAG
ATGCTGATGCCAATGGTGCTTATCATATTGGGCTAAAAGGTCTGATGCTACTA
GGTAGGATCAAAAATAATCAAGAGGGCAAAAAACTCAATTTGGTTATCAAAA
ATGAAGAGTATTTTGAGTTCGTGCAGAATAGGAATAACTAATTCATTCAAGA
ATATATTACCCTGTCAGTTTAGCGACTATTACCTCTTTAATAATTTGCAGGGG
AATTATTTTAGTAATAGTAATATACACAAGAGTTATTGATTATATGGAAAATT

[chemical structure]

[chemical structure]

[chemical structure]

[chemical structure]

[chemical structure]

[chemical structure]

[chemical structure]

[chemical structure]

[chemical structure]

[chemical structure]

ATATAGTTTTTGTTAATATTTTTGATGGAGTGAAACTTAGTCTATCATTGGGG
AATATAGTTATAAAAGATAAAGAAACTGATGAGGTGAAAACTAAGCTTTCTG
TTCATAAAGTTCTTGCATTGTTTATCGTAGGTAATATGACGATGACCTCGCAA
CTTTTAGAGACCTGTAAGAAAAATGCTATACAGCTAGTTTTTATGAAAAATA
GCTTTAGACCATATCTATGTTTTGGTGATATTGCTGAGGCTAATTTTTTAGCTA
GATATAAGCAATATAGTGTAGTTGAGCAAGATATAAGTTTAGCAAGGATTTT
TATAACATCAAAGATACGCAATCAACATAACTTAGTCAAAAGCCTAAGAGAT
AAAACTCCAGAGCAGCAAGAGATAGTCAAAAAGAATAAACAGCTAATAGCA
GAGTTAGAAAATACAACAAGCCTAGCGGAGCTAATGGGTATAGAGGGCAAT
GTTGCCAAAAATTTCTTCAAAGGATTCTATGGACATTTAGATAGTTGGCAAGG
GCGCAAACCTAGAATAAAACAGGATCCATATAATGTTGTTTTAGACTTGGGC
TATAGTATGTTGTTTAATTTTGTAGAGTGTTTTTTGCGACTTTTTGGCTTTGAT
TTATACAAGGGCTTTTGTCATCAGACTTGGTATAAGCGTAAATCCCTAGTTTG
TGACTTTGTTGAGCCATTTAGATGTATAGTGGATAACCAAGTTAGAAAATCAT
GGAATCTCGGGCAATTTTCTGTAGAGGATTTTGGTTGCAAAAATGAGCAGTTT
TATATAAAAAAAGATAAAACAAAAGACTACTCAAAAATACTTTTTGCCGAGA
TTATCAGCTACAAGCTAGAGATATTTGAATATGTAAGAGAATTTTATCGTGCC
TTTATGCGAGGCAAAGAAATTGCAGAGTATCCAATATTTTGTTATGAAACTA
GGAGGGTGTATGTTGATAGTCAGTTATGATTTTAGTAATAATAAAGTACGTGC
AAAGTTTGCCAAATTTCTAGAAAGTTATGGTGTACGTTTACAATATTCGGTAT
TTGAGCTCAAATATAGCAAGAGAATGTTAGACTTGATTTTAGCTGAGATAGA
AAATAACTATGTACCACTATTTACAAATGCTGATAGTGTTTTAATCTTTAATG
CTCCAGATAAAGATGTGATAAAATATGGTTATGCGATTCATAGAGAACAAGA
GGTTGTTTTTATAGACTAAAAATTGCAAACCTTAGTCTTTATGTTAAAATAAC
TACTAAGTTCTTAGAGATATTTAAAAATATGACTGTTGTTATATATCAAAATG
CTAAAAAAATCATAGATTTTAGGTCTTTTTTTGCTGATTTAGGCAAAAACGGG

[chemical structure]

[chemical structure]

[chemical structure]

CTACTGTTGTAGATGTCTAGAGCCTTTTGTATTAGTAGCCGGTCTAAGAACT

[chemical structure]

TCT
pFnCpf1_min

[chemical structure]

Shine-Dalgarno sequence
FnCpf1

[chemical structure]

Direct repeats

[chemical structure]

(SEQ ID NO: 212)

[chemical structure]

TTATCAAGAATTTGTTAATAAATATAGTTTAAGTAAAACTCTAAGATTTGAGTTAATC
CCACAGGGTAAAACACTTGAAAACATAAAAGCAAGAGGTTTGATTTTAGATGATGA
GAAAAGAGCTAAAGACTACAAAAAGGCTAAACAAATAATTGATAAATATCATCAGT
TTTTTATAGAGGAGATATTAAGTTCGGTTTGTATTAGCGAAGATTTATTACAAAACTA
TTCTGATGTTTATTTTAAACTTAAAAAGAGTGATGATGATAATCTACAAAAAGATTTT
AAAAGTGCAAAAGATACGATAAAGAAACAAATATCTGAATATATAAAGGACTCAGA
GAAATTTAAGAATTTGTTTAATCAAAACCTTATCGATGCTAAAAAAGGGCAAGAGTC
AGATTTAATTCTATGGCTAAAGCAATCTAAGGATAATGGTATAGAACTATTTAAAGC
CAATAGTGATATCACAGATATAGATGAGGCGTTAGAAATAATCAAATCTTTTAAAGG
TTGGACAACTTATTTTAAGGGTTTTCATGAAAATAGAAAAAATGTTTATAGTAGCAA
TGATATTCCTACATCTATTATTTATAGGATAGTAGATGATAATTTGCCTAAATTTCTA
GAAAATAAAGCTAAGTATGAGAGTTTAAAAGACAAAGCTCCAGAAGCTATAAACTA
TGAACAAATTAAAAAAGATTTGGCAGAAGAGCTAACCTTTGATATTGACTACAAAAC
ATCTGAAGTTAATCAAAGAGTTTTTTCACTTGATGAAGTTTTTGAGATAGCAAACTTT
AATAATTATCTAAATCAAAGTGGTATTACTAAATTTAATACTATTATTGGTGGTAAAT
TTGTAAATGGTGAAAATACAAAGAGAAAAGGTATAAATGAATATATAAATCTATACT
CACAGCAAATAAATGATAAAACACTCAAAAAATATAAAATGAGTGTTTTATTTAAGC
AAATTTTAAGTGATACAGAATCTAAATCTTTTGTAATTGATAAGTTAGAAGATGATA
GTGATGTAGTTACAACGATGCAAAGTTTTTATGAGCAAATAGCAGCTTTTAAAACAG
TAGAAGAAAAATCTATTAAAGAAACACTATCTTTATTATTTGATGATTTAAAAGCTC
AAAAACTTGATTTGAGTAAAATTTATTTTAAAAATGATAAATCTCTTACTGATCTATC
ACAACAAGTTTTTGATGATTATAGTGTTATTGGTACAGCGGTACTAGAATATATAACT
CAACAAATAGCACCTAAAAATCTTGATAACCCTAGTAAGAAAGAGCAAGAATTAAT
AGCCAAAAAAACTGAAAAAGCAAAATACTTATCTCTAGAAACTATAAAGCTTGCCTT
AGAAGAATTTAATAAGCATAGAGATATAGATAAACAGTGTAGGTTTGAAGAAATAC
TTGCAAACTTTGCGGCTATTCCGATGATATTTGATGAAATAGCTCAAAACAAAGACA
ATTTGGCACAGATATCTATCAAATATCAAAATCAAGGTAAAAAAGACCTACTTCAAG
CTAGTGCGGAAGATGATGTTAAAGCTATCAAGGATCTTTTAGATCAAACTAATAATC
TCTTACATAAACTAAAAAATATTTCATATTAGTCAGTCAGAAGATAAGGCAAATATTT
TAGACAAGGATGAGCATTTTTATCTAGTATTTGAGGAGTGCTACTTTGAGCTAGCGA
ATATAGTGCCTCTTTATAACAAAATTAGAAACTATATAACTCAAAAGCCATATAGTG
ATGAGAAATTTAAGCTCAATTTTGAGAACTCGACTTTGGCTAATGGTTGGGATAAAA
ATAAAGAGCCTGACAATACGGCAATTTTATTTATCAAAGATGATAAATATTATCTGG
GTGTGATGAATAAGAAAAATAACAAAATATTTGATGATAAAGCTATCAAAGAAAAT
AAAGGCGAGGGTTATAAAAAAATTGTTTATAAACTTTTACCTGGCGCAAATAAAATG
TTACCTAAGGTTTTCTTTTCTGCTAAATCTATAAAATTTTATAATCCTAGTGAAGATAT
ACTTAGAATAAGAAATCATTCCACACATACAAAAAATGGTAGTCCTCAAAAAGGAT
ATGAAAAATTTGAGTTTAATATTGAAGATTGCCGAAAATTTATAGATTTTTATAAACA
GTCTATAAGTAAGCATCCGGAGTGGAAAGATTTTGGATTTAGATTTTCTGATACTCA
AAGATATAATTCTATAGATGAATTTTATAGAGAAGTTGAAAATCAAGGCTACAAACT
AACTTTTGAAAATATATCAGAGAGCTATATTGATAGCGTAGTTAATCAGGGTAAATT
GTACCTATTCCAAATCTATAATAAAGATTTTTCAGCTTATAGCAAAGGGCGACCAAA
TCTACATACTTTATATTGGAAAGCGCTGTTTGATGAGAGAAATCTTCAAGATGTGGTT
TATAAGCTAAATGGTGAGGCAGAGCTTTTTTATCGTAAACAATCAATACCTAAAAAA
ATCACTCACCCAGCTAAAGAGGCAATAGCTAATAAAAACAAAGATAATCCTAAAAA
AGAGAGTGTTTTTGAATATGATTTAATCAAAGATAAACGCTTTACTGAAGATAAGTT
TTTCTTTCACTGTCCTATTACAATCAATTTTAAATCTAGTGGAGCTAATAAGTTTAAT
GATGAAATCAATTTATTGCTAAAAGAAAAAGCAAATGATGTTCATATATTAAGTATA
GATAGAGGTGAAAGACATTTAGCTTACTATACTTTGGTAGATGGTAAAGGCAATATC
ATCAAACAAGATACTTTCAACATCATTGGTAATGATAGAATGAAAACAAACTACCAT
GATAAGCTTGCTGCAATAGAGAAAGATAGGGATTCAGCTAGGAAAGACTGGAAAAA
GATAAATAACATCAAAGAGATGAAAGAGGGCTATCTATCTCAGGTAGTTCATGAAAT
AGCTAAGCTAGTTATAGAGTATAATGCTATTGTGGTTTTTGAGGATTTAAATTTTGGA
TTTAAAAGAGGGCGTTTCAAGGTAGAGAAGCAGGTCTATCAAAAGTTAGAAAAAAT
GCTAATTGAGAAACTAAACTATCTAGTTTTCAAAGATAATGAGTTTGATAAAACTGG
GGGAGTGCTTAGAGCTTATCAGCTAACAGCACCTTTTGAGACTTTTAAAAAGATGGG
TAAACAAACAGGTATTATCTACTATGTACCAGCTGGTTTTACTTCAAAAATTTGTCCT
GTAACTGGTTTTGTAAATCAGTTATATCCTAAGTATGAAAGTGTCAGCAAATCTCAA
GAGTTCTTTAGTAAGTTTGACAAGATTTGTTATAACCTTGATAAGGGCTATTTTGAGT
TTAGTTTTGATTATAAAAACTTTGGTGACAAGGCTGCCAAAGGCAAGTGGACTATAG
CTAGCTTTGGGAGTAGATTGATTAACTTTAGAAATTCAGATAAAAATCATAATTGGG
ATACTCGAGAAGTTTATCCAACTAAAGAGTTGGAGAAATTGCTAAAAGATTATTCTA
TCGAATATGGGCATGGCGAATGTATCAAAGCAGCTATTTGCGGTGAGAGCGACAAA
AAGTTTTTTGCTAAGCTAACTAGTGTCCTAAATACTATCTTACAAATGCGTAACTCAA
AAACAGGTACTGAGTTAGATTATCTAATTTCACCAGTAGCAGATGTAAATGGCAATT
TCTTTGATTCGCGACAGGCGCCAAAAAATATGCCTCAAGATGCTGATGCCAATGGTG
CTTATCATATTGGGCTAAAAGGTCTGATGCTACTAGGTAGGATCAAAAATAATCAAG
AGGGCAAAAAACTCAATTTGGTTATCAAAAATGAAGAGTATTTTGAGTTCGTGCAGA

[chemical structure]

TACTGTTGTAGA
pFnCpf1_ΔCas
5′ end of endogenous F. novicida acetyltransferase
(upstream of FnCpf1 locus
FnCpf1
Direct repeats

[chemical structure]

(SEQ ID NO: 213)
CTGTCTACTATGCCGATGAGTTTGGCAAAATTTTTTAGATCTACAAAATTATA
AACTAAATAAAGATTCTTATAATAACTTTATATATAATCGAAATGTAGAGAATTTTAT
AAGGAGTCTTTATCATGTCAATTTATCAAGAATTTGTTAATAAATATAGTTTAAGTAA
AACTCTAAGATTTGAGTTAATCCCACAGGGTAAAACACTTGAAAACATAAAAGCAA
GAGGTTTGATTTTAGATGATGAGAAAAGAGCTAAAGACTACAAAAAGGCTAAACAA
ATAATTGATAAATATCATCAGTTTTTTATAGAGGAGATATTAAGTTCGGTTTGTATTA
GCGAAGATTTATTACAAAACTATTCTGATGTTTATTTTAAACTTAAAAAGAGTGATGA
TGATAATCTACAAAAAGATTTTAAAAGTGCAAAAGATACGATAAAGAAACAAATAT
CTGAATATATAAAGGACTCAGAGAAATTTAAGAATTTGTTTAATCAAAACCTTATCG
ATGCTAAAAAAGGGCAAGAGTCAGATTTAATTCTATGGCTAAAGCAATCTAAGGATA
ATGGTATAGAACTATTTAAAGCCAATAGTGATATCACAGATATAGATGAGGCGTTAG
AAATAATCAAATCTTTTAAAGGTTGGACAACTTATTTTAAGGGTTTTCATGAAAATAG
AAAAAATGTTTATAGTAGCAATGATATTCCTACATCTATTATTTATAGGATAGTAGAT
GATAATTTGCCTAAATTTCTAGAAAATAAAGCTAAGTATGAGAGTTTAAAAGACAAA
GCTCCAGAAGCTATAAACTATGAACAAATTAAAAAAGATTTGGCAGAAGAGCTAAC
CTTTGATATTGACTACAAAACATCTGAAGTTAATCAAAGAGTTTTTTCACTTGATGAA
GTTTTTGAGATAGCAAACTTTAATAATTATCTAAATCAAAGTGGTATTACTAAATTTA
ATACTATTATTGGTGGTAAATTTGTAAATGGTGAAAATACAAAGAGAAAAGGTATAA
ATGAATATATAAATCTATACTCACAGCAAATAAATGATAAAACACTCAAAAAATATA
AAATGAGTGTTTTATTTAAGCAAATTTTAAGTGATACAGAATCTAAATCTTTTGTAAT
TGATAAGTTAGAAGATGATAGTGATGTAGTTACAACGATGCAAAGTTTTTATGAGCA
AATAGCAGCTTTTAAAACAGTAGAAGAAAAATCTATTAAAGAAACACTATCTTTATT
ATTTGATGATTTAAAAGCTCAAAAACTTGATTTGAGTAAAATTTATTTTAAAAATGAT
AAATCTCTTACTGATCTATCACAACAAGTTTTTGATGATTATAGTGTTATTGGTACAG
CGGTACTAGAATATATAACTCAACAAATAGCACCTAAAAATCTTGATAACCCTAGTA
AGAAAGAGCAAGAATTAATAGCCAAAAAAACTGAAAAAGCAAAATACTTATCTCTA
GAAACTATAAAGCTTGCCTTAGAAGAATTTAATAAGCATAGAGATATAGATAAACA
GTGTAGGTTTGAAGAAATACTTGCAAACTTTGCGGCTATTCCGATGATATTTGATGA
AATAGCTCAAAACAAAGACAATTTGGCACAGATATCTATCAAATATCAAAATCAAG
GTAAAAAGACCTACTTCAAGCTAGTGCGGAAGATGATGTTAAAGCTATCAAGGATC
TTTTAGATCAAACTAATAATCTCTTACATAAACTAAAAATATTTCATATTAGTCAGTC
AGAAGATAAGGCAAATATTTTAGACAAGGATGAGCATTTTTATCTAGTATTTGAGGA
GTGCTACTTTGAGCTAGCGAATATAGTGCCTCTTTATAACAAAATTAGAAACTATAT
AACTCAAAAGCCATATAGTGATGAGAAATTTAAGCTCAATTTTGAGAACTCGACTTT
GGCTAATGGTTGGGATAAAAATAAAGAGCCTGACAATACGGCAATTTTATTTATCAA
AGATGATAAATATTATCTGGGTGTGATGAATAAGAAAAATAACAAAATATTTGATGA
TAAAGCTATCAAAGAAAATAAAGGCGAGGGTTATAAAAAAATTGTTTATAAACTTTT
ACCTGGCGCAAATAAAATGTTACCTAAGGTTTTCTTTTCTGCTAAATCTATAAAATTT
TATAATCCTAGTGAAGATATACTTAGAATAAGAAATCATTCCACACATACAAAAAAT
GGTAGTCCTCAAAAAGGATATGAAAAATTTGAGTTTAATATTGAAGATTGCCGAAAA
TTTATAGATTTTTATAAACAGTCTATAAGTAAGCATCCGGAGTGGAAAGATTTTGGAT
TTAGATTTTCTGATACTCAAAGATATAATTCTATAGATGAATTTTATAGAGAAGTTGA
AAATCAAGGCTACAAACTAACTTTTGAAAATATATCAGAGAGCTATATTGATAGCGT
AGTTAATCAGGGTAAATTGTACCTATTCCAAATCTATAATAAAGATTTTTCAGCTTAT
AGCAAAGGGCGACCAAATCTACATACTTTATATTGGAAAGCGCTGTTTGATGAGAGA
AATCTTCAAGATGTGGTTTATAAGCTAAATGGTGAGGCAGAGCTTTTTTATCGTAAA
CAATCAATACCTAAAAAAATCACTCACCCAGCTAAAGAGGCAATAGCTAATAAAAA
CAAAGATAATCCTAAAAAAGAGAGTGTTTTTGAATATGATTTAATCAAAGATAAACG
CTTTACTGAAGATAAGTTTTTCTTTCACTGTCCTATTACAATCAATTTTAAATCTAGTG
GAGCTAATAAGTTTAATGATGAAATCAATTTATTGCTAAAAGAAAAAGCAAATGATG
TTCATATATTAAGTATAGATAGAGGTGAAAGACATTTAGCTTACTATACTTTGGTAGA
TGGTAAAGGCAATATCATCAAACAAGATACTTTCAACATCATTGGTAATGATAGAAT
GAAAACAAACTACCATGATAAGCTTGCTGCAATAGAGAAAGATAGGGATTCAGCTA
GGAAAGACTGGAAAAAGATAAATAACATCAAAGAGATGAAAGAGGGCTATCTATCT
CAGGTAGTTCATGAAATAGCTAAGCTAGTTATAGAGTATAATGCTATTGTGGTTTTTG
AGGATTTAAATTTTGGATTTAAAAGAGGGCGTTTCAAGGTAGAGAAGCAGGTCTATC
AAAAGTTAGAAAAAATGCTAATTGAGAAACTAAACTATCTAGTTTTCAAAGATAATG
AGTTTGATAAAACTGGGGGAGTGCTTAGAGCTTATCAGCTAACAGCACCTTTTGAGA
CTTTTAAAAAGATGGGTAAACAAACAGGTATTATCTACTATGTACCAGCTGGTTTTA
CTTCAAAAATTTGTCCTGTAACTGGTTTTGTAAATCAGTTATATCCTAAGTATGAAAG
TGTCAGCAAATCTCAAGAGTTCTTTAGTAAGTTTGACAAGATTTGTTATAACCTTGAT
AAGGGCTATTTTGAGTTTAGTTTTGATTATAAAAACTTTGGTGACAAGGCTGCCAAA
GGCAAGTGGACTATAGCTAGCTTTGGGAGTAGATTGATTAACTTTAGAAATTCAGAT
AAAAATCATAATTGGGATACTCGAGAAGTTTATCCAACTAAAGAGTTGGAGAAATTG
CTAAAAGATTATTCTATCGAATATGGGCATGGCGAATGTATCAAAGCAGCTATTTGC
GGTGAGAGCGACAAAAGTTTTTTGCTAAGCTAACTAGTGTCCTAAATACTATCTTA
CAAATGCGTAACTCAAAAACAGGTACTGAGTTAGATTATCTAATTTCACCAGTAGCA
GATGTAAATGGCAATTTCTTTGATTCGCGACAGGCGCCAAAAAATATGCCTCAAGAT
GCTGATGCCAATGGTGCTTATCATATTGGGCTAAAAGGTCTGATGCTACTAGGTAGG
ATCAAAAATAATCAAGAGGGCAAAAAACTCAATTTGGTTATCAAAAATGAAGAGTA
TTTTGAGTTCGTGCAGAATAGGAATAACTAATTCATTCAAGAATATATTACCCTGTCA
GTTTAGCGACTATTACCTCTTTAATAATTTGCAGGGGAATTATTTTAGTAATAGTAAT
ATACACAAGAGTTATTGATTATATGGAAAATTATATTTAGATAACATGGTTAAATGA
TTTTATATTCTGTCCTTACTCGATATATTTTTTATAGACTAAAAATTGCAAACCTTAGT
CTTTATGTTAAAATAACTACTAAGTTCTTAGAGATATTTAAAAATATGACTGTTGTTA
TATATCAAAATGCTAAAAAAATCATAGATTTTAGGTCTTTTTTTGCTGATTTAGGCAA

[chemical structure]

[chemical structure]

[chemical structure]

[chemical structure]

[chemical structure]

Nucleotide sSequences of human codon optimized Cpf1
orthologs
Nuclear localization signal (NLS)
Glycine-Serine linker
3x HA tag

[chemical structure]

(SEQ ID NO: 214)
ATGAGCATCTACCAGGAGTTCGTCAACAAGTATTCACTGAGTAAGACACT
GCGGTTCGAGCTGATCCCACAGGGCAAGACACTGGAGAACATCAAGGCCCGAGGCC
TGATTCTGGACGATGAGAAGCGGGCAAAAGACTATAAGAAAGCCAAGCAGATCATT
GATAAATACCACCAGTTCTTTATCGAGGAAATTCTGAGCTCCGTGTGCATCAGTGAG
GATCTGCTGCAGAATTACTCAGACGTGTACTTCAAGCTGAAGAAGAGCGACGATGAC
AACCTGCAGAAGGACTTCAAGTCCGCCAAGGACACCATCAAGAAACAGATTAGCGA
GTACATCAAGGACTCCGAAAAGTTTAAAAATCTGTTCAACCAGAATCTGATCGATGC
TAAGAAAGGCCAGGAGTCCGACCTGATCCTGTGGCTGAAACAGTCTAAGGACAATG
GGATTGAACTGTTCAAGGCTAACTCCGATATCACTGATATTGACGAGGCACTGGAAA
TCATCAAGAGCTTCAAGGGATGGACCACATACTTTAAAGGCTTCCACGAGAACCGCA
AGAACGTGTACTCCAGCAAQCGACATTCCTACCTCCAQTCATCTACCGAATCGTCGATG
ACAATCTGCCAAAGTTCCTGGAGAACAAGGCCAAATATGAATCTCTGAAGGACAAA
GCTCCCGAGGCAATTAATTACGAACAGATCAAGAAAGATCTGGCTGAGGAACTGAC
ATTCGATATCGACTATAAGACTAGCGAGGTGAACCAGAGGGTCTTTTCCCTGGACGA
GGTGTTTGAAATCGCCAATTTCAACAATTACCTGAACCAGTCCGGCATTACTAAATTC
AATACCATCATGGCGGGAAGTTTGTGAACGGGGAGAATACCAAGCGCAAGGGAAT
TAACGAATACATCAATCTGTATAGCCAGCAGATCAACGACAAAACTCTGAAGAAAT
ACAAGATGTCTGTGCTGTTCAAACAGATCCTGAGTGATACCGAGTCCAAGTCTTTTGT
CATTGATAAACTGGAAGATGACTCAGACGTGGTCACTACCATGCAGAGCTTTTATGA
GCAGATCGCCGCTTTCAAGACAGTGGAGGAAAAATCTATTAAGGAAACTCTGAGTCT
GCTGTTCGATGACCTGAAAGCCCAGAAGCTGGACCTGAGTAAGATCTACTTCAAAAA
CGATAAGAGTCTGACAGACCTGTCACAGCAGGTGTTTGATGACTATTCCGTGATTGG
GACCGCCGTCCTGGAGTACATTACACAGCAGATCGCTCCAAAGAACCTGGATAATCC
CTCTAAGAAAGAGCAGGAACTGATCGCTAAGAAAACCGAGAAGGCAAAATATCTGA
GTCTGGAAACAATTAAGCTGGCACTGGAGGAGTTCAACAAGCACAGGGATATTGAC
AAACAGTGCCGCTTTGAGGAAATCCTGGCCAACTTCGCAGCCATCCCCATGATTTTT
GATGAGATCGCCCAGAACAAAGACAATCTGGCTCAGATCAGTATTAAGTACCAGAA
CCAGGGCAAGAAAGACCTGCTGCAGGCTTCAGCAGAAGATGACGTGAAAGCCATCA
AGGATCTGCTGGACCAGACCAACAATCTGCTGCACAAGCTGAAAATCTTCCATATTA
GTCAGTCAGAGGATAAGGCTAATATCCTGGATAAAGACGAACACTTCTACCTGGTGT
TCGAGGAATGTTACTTCGAGCTGGCAAACATTGTCCCCCTGTATAACAAGATTAGGA
ACTACATCACACAGAAGCCTTACTCTGACGAGAAGTTTAAACTGAACTTCGAAAATA
GTACCCTGGCCAACGGGTGGGATAAGAACAAGGAGCCTGACAACACAGCTATCCTG
TTCATCAAGGATGACAAGTACTATCTGGGAGTGATGAATAAGAAAAACAATAAGAT
CTTCGATGACAAAGCCATTAAGGAGAACAAAGGGGAAGGATACAAGAAAATCGTGT
ATAAGCTGCTGCCCGGCGCAAATAAGATGCTGCCTAAGGTGTTCTTCAGCGCCAAGA
GTATCAAATTCTACAACCCATCCGAGGACATCCTGCGGATTAGAAATCACTCAACAC
ATACTAAGAACGGGAGCCCCCAGAAGGGATATGAGAAATTTGAGTTCAACATCGAG
GATTGCAGGAAGTTTATTGACTTCTACAAGCAGAGCATCTCCAAACACCCTGAATGG
AAGGATTTTGGCTTCCGGTTTTCCGACACACAGAGATATAACTCTATCGACGAGTTCT
ACCGCGAGGTGGAAAATCAGGGGTATAAGCTGACTTTTGAGAACATTTCTGAAAGTT
ACATCGACAGCGTGGTCAATCAGGGAAAGCTGTACCTGTTCCAGATCTATAACAAAG
ATTTTTCAGCATACAGCAAGGGCAGACCAAACCTGCATACACTGTACTGGAAGGCCC
TGTTCGATGAGAGGAATCTGCAGGACGTGGTCTATAAACTGAACGGAGAGGCCGAA
CTGTTTTACCGGAAGCAGTCTATTCCTAAGAAAATCACTCACCCAGCTAAGGAGGCC
ATCGCTAACAAGAACAAGGACAATCCTAAGAAAGAGAGCGTGTTCGAATACGATCT
GATTAAGGACAAGCGGTTCACCGAAGATAAGTTCTTTTTCCATTGTCCAATCACCATT
AACTTCAAGTCAAGCGGCGCTAACAAGTTCAACGACGAGATCAATCTGCTGCTGAAG
GAAAAAGCAAACGATGTGCACATCCTGAGCATTGACCGAGGAGAGCGGCATCTGGC
CTACTATACCCTGGTGGATGGCAAAGGGAATATCATTAAGCAGGATACATTCAACAT
CATTGGCAATGACCGGATGAAAACCAACTACCACGATAAACTGGCTGCAATCGAGA
AGGATAGAGACTCAGCTAGGAAGGACTGGAAGAAAATCAACAACATTAAGGAGATG
AAGGAAGGCTATCTGAGCCAGGTGGTCCATGAGATTGCAAAGCTGGTCATCGAATAC
AATGCCATTGTGGTGTTCGAGGATCTGAACTTCGGCTTTAAGAGGGGGCGCTTTAAG
GTGGAAAAACAGGTCTATCAGAAGCTGGAGAAAATGCTGATCGAAAAGCTGAATTA
CCTGGTGTTTAAAGATAACGAGTTCGACAAGACCGGAGGCGTCCTGAGAGCCTACCA
GCTGACAGCTCCCTTTGAAACTTTCAAGAAAATGGGAAAACAGACAGGCATCATCTA
CTATGTGCCAGCCGGATTCACTTCCAAGATCTGCCCCGTGACCGGCTTTGTCAACCAG
CTGTACCCTAAATATGAGTCAGTGAGCAAGTCCCAGGAATTTTTCAGCAAGTTCGAT
AAGATCTGTTATAATCTGGACAAGGGGTACTTCGAGTTTTCCTTCGATTACAAGAACT
TCGGCGACAAGGCCGCTAAGGGGAAATGGACCATTGCCTCCTTCGGATCTCGCCTGA
TCAACTTTCGAAATTCCGATAAAAACCACAATTGGGACACTAGGGAGGTGTACCCAA
CCAAGGAGCTGGAAAAGCTGCTGAAAGACTACTCTATCGAGTATGGACATGGCGAA
TGCATCAAGGCAGCCATCTGTGGCGAGAGTGATAAGAAATTTTTCGCCAAGCTGACC
TCAGTGCTGAATACAATCCTGCAGATGCGGAACTCAAAGACCGGGACAGAACTGGA
CTATCTGATTAGCCCCGTGGCTGATGTCAACGGAAACTTCTTCGACAGCAGACAGGC
ACCCAAAAATATGCCTCAGGATGCAGACGCCAACGGGGCCTACCACATCGGGCTGA
AGGGACTGATGCTGCTGGGCCGGATCAAGAACAATCAGGAGGGGAAGAAGCTGAAC
CTGGTCATTAAGAACGAGGAATACTTCGAGTTTGTCCAGAATAGAAATAACAAAAGG
CCGGCGGCCACGAAAAAGGCCGGCCAGGCAAAAAGAAAAAGGGATCCTACCCATACG
ATGTTCCAGATTACGCTTATCCCTACGACGTGCCTGATTATGCATACCCATATG
ATGTCCCCGACTATGCC
3-Lachnospiraceae bacterium MC2017 (Lb3Cpf1)
(SEQ ID NO: 215)
ATGGATTACGGCAACGGCCAGTTTGAGCGGAGAGCCCCCCTGACCAAGA
CAATCACCCTGCGCCTGAAGCCTATCGGCGAGACACGGGAGACAATCCGCGAGCAG
AAGCTGCTGGAGCAGGACGCCGCCTTCAGAAAGCTGGTGGAGACAGTGACCCCTAT
CGTGGACGATTGTATCAGGAAGATCGCCGATAACGCCCTGTGCCACTTTGGCACCGA
GTATGACTTCAGCTGTCTGGGCAACGCCATCTCTAAGAATGACAGCAAGGCCATCAA
GAAGGAGACAGAGAAGGTGGAGAAGCTGCTGGCCAAGGTGCTGACCGAGAATCTGC
CAGATGGCCTGCGCAAGGTGAACGACATCAATTCCGCCGCCTTTATCCAGGATACAC
TGACCTCTTTCGTGCAGGACGATGCCGACAAGCGGGTGCTGATCCAGGAGCTGAAGG
GCAAGACCGTGCTGATGCAGCGGTTCCTGACCACACGGATCACAGCCCTGACCGTGT
GGCTGCCCGACAGAGTGTTCGAGAACTTTAATATCTTCATCGAGAACGCCGAGAAGA
TGAGAATCCTGCTGGACTCCCCTCTGAATGAGAAGATCATGAAGTTTGACCCAGATG
CCGAGCAGTACGCCTCTCTGGAGTTCTATGGCCAGTGCCTGTCTCAGAAGGACATCG
ATAGCTACAACCTGATCATCTCCGGCATCTATGCCGACGATGAGGTGAAGAACCCTG
GCATCAATGAGATCGTGAAGGAGTACAATCAGCAGATCCGGGGCGACAAGGATGAG
TCCCCACTGCCCAAGCTGAAGAAGCTGCACAAGCAGATCCTGATGCCAGTGGAGAA
GGCCTTCTTTGTGCGCGTGCTGTCTAACGACAGCGATGCCCGGAGCATCCTGGAGAA
GATCCTGAAGGACACAGAGATGCTGCCCTCCAAGATCATCGAGGCCATGAAGGAGG
CAGATGCAGGCGACATCGCCGTGTACGGCAGCCGGCTGCACGAGCTGAGCCACGTG
ATCTACGGCGATCACGGCAAGCTGTCCCAGATCATCTATGACAAGGAGTCCAAGAGG
ATCTCTGAGCTGATGGAGACACTGTCTCCAAAGGAGCGCAAGGAGAGCAAGAAGCG
GCTGGAGGGCCTGGAGGAGCACATCAGAAAGTCTACATACACCTTCGACGAGCTGA
ACAGGTATGCCGAGAAGAATGTGATGGCAGCATACATCGCAGCAGTGGAGGAGTCT
TGTGCCGAGATCATGAGAAAGGAGAAGGATCTGAGGACCCTGCTGAGCAAGGAGGA
CGTGAAGATCCGGGGCAACAGACACAATACACTGATCGTGAAGAACTACTTTAATGC
CTGGACCGTGTTCCGGAACCTGATCAGAATCCTGAGGCGCAAGTCCGAGGCCGAGAT
CGACTCTGACTTCTACGATGTGCTGGACGATTCCGTGGAGGTGCTGTCTCTGACATAC
AAGGGCGAGAATCTGTGCCGCAGCTATATCACCAAGAAGATCGGCTCCGACCTGAA
GCCCGAGATCGCCACATACGGCAGCGCCCTGAGGCCTAACAGCCGCTGGTGGTCCCC
AGGAGAGAAGTTTAATGTGAAGTTCCACACCATCGTGCGGAGAGATGGCCGGCTGT
ACTATTTCATCCTGCCCAAGGGCGCCAAGCCTGTGGAGCTGGAGGACATGGATGGCG
ACATCGAGTGTCTGCAGATGAGAAAGATCCCTAACCCAACAATCTTTCTGCCCAAGC
TGGTGTTCAAGGACCCTGAGGCCTTCTTTAGGGATAATCCAGAGGCCGACGAGTTCG
TGTTTCTGAGCGGCATGAAGGCCCCCGTGACAATCACCAGAGAGACATACGAGGCCT
ACAGGTATAAGCTGTATACCGTGGGCAAGCTGCGCGATGGCGAGGTGTCCGAAGAG
GAGTACAAGCGGGCCCTGCTGCAGGTGCTGACCGCCTACAAGGAGTTTCTGGAGAAC
AGAATGATCTATGCCGACCTGAATTTCGGCTTTAAGGATCTGGAGGAGTATAAGGAC
AGCTCCGAGTTTATCAAGCAGGTGGAGACACACAACACCTCCATGTGCTGGGCCAAG
GTGTCTAGCTCCCAGCTGGACGATCTGGTGAAGTCTGGCAACGGCCTGCTGTTCGAG
ATCTGGAGCGAGCGCCTGGAGTCCTACTATAAGTACGGCAATGAGAAGGTGCTGCG
GGGCTATGAGGGCGTGCTGCTGAGCATCCTGAAGGATGAGAACCTGGTGTCCATGCG
GACCCTGCTGAACAGCCGGCCCATGCTGGTGTACCGGCCAAAGGAGTCTAGCAAGCC
TATGGTGGTGCACCGGGATGGCAGCAGAGTGGTGGACAGGTTTGATAAGGACGGCA
AGTACATCCCCCCTGAGGTGCACGACGAGCTGTATCGCTTCTTTAACAATCTGCTGAT
CAAGGAGAAGCTGGGCGAGAAGGCCCGGAAGATCCTGGACAACAAGAAGGTGAAG
GTGAAGGTGCTGGAGAGCGAGAGAGTGAAGTGGTCCAAGTTCTACGATGAGCAGTT
TGCCGTGACCTTCAGCGTGAAGAAGAACGCCGATTGTCTGGACACCACAAAGGACCT
GAATGCCGAAGTGATGGAGCAGTATAGCGAGTCCAACAGACTGATCCTGATCAGGA
ATACCACAGATATCCTGTACTATCTGGTGCTGGACAAGAATGGCAAGGTGCTGAAGC
AGAGATCCCTGAACATCATCAATGACGGCGCCAGGGATGTGGACTGGAAGGAGAGG
TTCCGCCAGGTGACAAAGGATAGAAACGAGGGCTACAATGAGTGGGATTATTCCAG
GACCTCTAACGACCTGAAGGAGGTGTACCTGAATTATGCCCTGAAGGAGATCGCCGA
GGCCGTGATCGAGTACAACGCCATCCTGATCATCGAGAAGATGTCTAATGCCTTTAA
GGACAAGTATAGCTTCCTGGACGACGTGACCTTCAAGGGCTTCGAGACAAAGCTGCT
GGCCAAGCTGAGCGATCTGCACTTTAGGGGCATCAAGGACGGCGAGCCATGTTCCTT
CACAAACCCCCTGCAGCTGTGCCAGAACGATTCTAATAAGATCCTGCAGGACGGCGT
GATCTTTATGGTGCCAAATTCTATGACACGGAGCCTGGACCCCGACACCGGCTTCAT
CTTTGCCATCAACGACCACAATATCAGGACCAAGAAGGCCAAGCTGAACTTTCTGAG
CAAGTTCGATCAGCTGAAGGTGTCCTCTGAGGGCTGCCTGATCATGAAGTACAGCGG
CGATTCCCTGCCTACACACAACACCGACAATCGCGTGTGGAACTGCTGTTGCAATCA
CCCAATCACAAACTATGACCGGGAGACAAAGAAGGTGGAGTTCATCGAGGAGCCCG
TGGAGGAGCTGTCCCGCGTGCTGGAGGAGAATGGCATCGAGACAGACACCGAGCTG
AACAAGCTGAATGAGCGGGAGAACGTGCCTGGCAAGGTGGTGGATGCCATCTACTC
TCTGGTGCTGAATTATCTGCGCGGCACAGTGAGCGGAGTGGCAGGACAGAGGGCCG
TGTACTATAGCCCTGTGACCGGCAAGAAGTACGATATCTCCTTTATCCAGGCCATGA
ACCTGAATAGGAAGTGTGACTACTATAGGATCGGCTCCAAGGAGAGGGGAGAGTGG
ACCGATTTCGTGGCCCAGCTGATCAACAAAAGGCCGGCGGCCACGAAAAAGGCCGGCC
AGGCAAAAAAGAAAAAGGGATCCTACCCATACGATGTTCCAGATTACGCTTATCCCT
ACGACGTGCCTGATTATGCATACCCATATGATGTCCCCGACTATGCC

[chemical structure]

(SEQ ID NO: 216)
ATGAGCATCTACCAGGAGTTCGTCAACAAGTATTCACTGAGTAAGACACT
GCGGTTCGAGCTGATCCCACAGGGCAAGACACTGGAGAACATCAAGGCCCGAGGCC
TGATTCTGGACGATGAGAAGCGGGCAAAAGACTATAAGAAAGCCAAGCAGATCATT
GATAAATACCACCAGTTCTTTATCGAGGAAATTCTGAGCTCCGTGTGCATCAGTGAG
GATCTGCTGCAGAATTACTCAGACGTGTACTTCAAGCTGAAGAAGAGCGACGATGAC
AACCTGCAGAAGGACTTCAAGTCCGCCAAGGAQCACCATCAAGAAACAGATTAGCGA
GTACATCAAGGACTCCGAAAAGTTTAAAAATCTGTTCAACCAGAATCTGATCGATGC
TAAGAAAGGCCAGGAGTCCGACCTGATCCTGTGGCTGAAACAGTCTAAGGACAATG
GGATTGAACTGTTCAAGGCTAACTCCGATATCACTGATATTGACGAGGCACTGGAAA
TCATCAAGAGCTTCAAGGGATGGACCACATACTTTAAAGGCTTCCACGAGAACCGCA
AGAACGTGTACTCCAGCAACGACATTCCTACCTCCATCATCTACCGAATCGTCGATG
ACAATCTGCCAAAGTTCCTGGAGAACAAGGCCAAATATGAATCTCTGAAGGACAAA
GCTCCCGAGGCAATTAATTACGAACAGATCAAGAAAGATCTGGCTGAGGAACTGAC
ATTCGATATCGACTATAAGACTAGCGAGGTGAACCAGAGGGTCTTTTCCCTGGACGA
GGTGTTTGAAATCGCCAATTTCAACAATTACCTGAACCAGTCCGGCATTACTAAATTC
AATACCATCATTGGCGGGAAGTTTGTGAACGGGGAGAATACCAAGCGCAAGGGAAT
TAACGAATACATCAATCTGTATAGCCAGCAGATCAACGACAAAACTCTGAAGAAAT
ACAAGATGTCTGTGCTGTTCAAACAGATCCTGAGTGATACCGAGTCCAAGTCTTTTGT
CATTGATAAACTGGAAGATGACTCAGACGTGGTCACTACCATGCAGAGCTTTTATGA
GCAGATCGCCGCTTTCAAGACAGTGGAGGAAAAATCTATTAAGGAAACTCTGAGTCT
GCTGTTCGATGACCTGAAAGCCCAGAAGCTGGACCTGAGTAAGATCTACTTCAAAAA
CGATAAGAGTCTGACAGACCTGTCACAGCAGGTGTTTGATGACTATTCCGTGATTGG
GACCGCCGTCCTGGAGTACATTACACAGCAGATCGCTCCAAAGAACCTGGATAATCC
CTCTAAGAAAGAGCAGGAACTGATCGCTAAGAAAACCGAGAAGGCAAAATATCTGA
GTCTGGAAACAATTAAGCTGGCACTGGAGGAGTTCAACAAGCACAGGGATATTGAC
AAACAGTGCCGCTTTGAGGAAATCCTGGCCAACTTCGCAGCCATCCCCATGATTTTT
GATGAGATCGCCCAGAACAAAGACAATCTGGCTCAGATCAGTATTAAGTACCAGAA
CCAGGGCAAGAAAGACCTGCTGCAGGCTTCAGCAGAAGATGACGTGAAAGCCATCA
AGGATCTGCTGGACCAGACCAACAATCTGCTGCACAAGCTGAAAATCTTCCATATTA
GTCAGTCAGAGGATAAGGCTAATATCCTGGATAAAGACGAACACTTCTACCTGGTGT
TCGAGGAATGTTACTTCGAGCTGGCAAACATTGTCCCCCTGTATAACAAGATTAGGA
ACTACATCACACAGAAGCCTTACTCTGACGAGAAGTTTAAACTGAACTTCGAAAATA
GTACCCTGGCCAACGGGTGGGATAAGAACAAGGAGCCTGACAACACAGCTATCCTG
TTCATCAAGGATGACAAGTACTATCTGGGAGTGATGAATAAGAAAAACAATAAGAT
CTTCGATGACAAAGCCATTAAGGAGAACAAAGGGGAAGGATACAAGAAAATCGTGT
ATAAGCTGCTGCCCGGCGCAAATAAGATGCTGCCTAAGGTGTTCTTCAGCGCCAAGA
GTATCAAATTCTACAACCCATCCGAGGACATCCTGCGGATTAGAAATCACTCAACAC
ATACTAAGAACGGGAGCCCCCAGAAGGGATATGAGAAATTTGAGTTCAACATCGAG
GATTGCAGGAAGTTTATTGACTTCTACAAGCAGAGCATCTCCAAACACCCTGAATGG
AAGGATTTTGGCTTCCGGTTTTCCGACACACAGAGATATAACTCTATCGACGAGTTCT
ACCGCGAGGTGGAAAATCAGGGGTATAAGCTGACTTTTGAGAACATTTCTGAAAGTT
ACATCGACAGCGTGGTCAATCAGGGAAAGCTGTACCTGTTCCAGATCTATAACAAAG
ATTTTTCAGCATACAGCAAGGGCAGACCAAACCTGCATACACTGTACTGGAAGGCCC
TGTTCGATGAGAGGAATCTGCAGGACGTGGTCTATAAACTGAACGGAGAGGCCGAA
CTGTTTTACCGGAAGCAGTCTATTCCTAAGAAAATCACTCACCCAGCTAAGGAGGCC
ATCGCTAACAAGAACAAGGACAATCCTAAGAAAGAGAGCGTGTTCGAATACGATCT
GATTAAGGACAAGCGGTTCACCGAAGATAAGTTCTTTTTCCATTGTCCAATCACCATT
AACTTCAAGTCAAGCGGCGCTAACAAGTTCAACGACGAGATCAATCTGCTGCTGAAG
GAAAAAGCAAACGATGTGCACATCCTGAGCATTGACCGAGGAGAGCGGCATCTGGC
CTACTATACCCTGGTGGATGGCAAAGGGAATATCATTAAGCAGGATACATTCAACAT
CATTGGCAATGACCGGATGAAAACCAACTACCACGATAAACTGGCTGCAATCGAGA
AGGATAGAGACTCAGCTAGGAAGGACTGGAAGAAAATCAACAACATTAAGGAGATG
AAGGAAGGCTATCTGAGCCAGGTGGTCCATGAGATTGCAAAGCTGGTCATCGAATAC
AATGCCATTGTGGTGTTCGAGGATCTGAACTTCGGCTTTAAGAGGGGGCGCTTTAAG
GTGGAAAAACAGGTCTATCAGAAGCTGGAGAAAATGCTGATCGAAAAGCTGAATTA
CCTGGTGTTTAAAGATAACGAGTTCGACAAGACCGGAGGCGTCCTGAGAGCCTACCA
GCTGACAGCTCCCTTTGAAACTTTCAAGAAAATGGGAAAACAGACAGGCATCATCTA
CTATGTGCCAGCCGGATTCACTTCCAAGATCTGCCCCGTGACCGGCTTTGTCAACCAG
CTGTACCCTAAATATGAGTCAGTGAGCAAGTCCCAGGAATTTTTCAGCAAGTTCGAT
AAGATCTGTTATAATCTGGACAAGGGGTACTTCGAGTTTTCCTTCGATTACAAGAACT
TCGGCGACAAGGCCGCTAAGGGGAAATGGACCATTGCCTCCTTCGGATCTCGCCTGA
TCAACTTTCGAAATTCCGATAAAAACCACAATTGGGACACTAGGGAGGTGTACCCAA
CCAAGGAGCTGGAAAAAGCTGCTGAAAGACTACTCTATCGAGTATGGACATGGCGAA
TGCATCAAGGCAGCCATCTGTGGCGAGAGTGATAAGAAATTTTTCGCCAAGCTGACC
TCAGTGCTGAATACAATCCTGCAGATGCGGAACTCAAAGACCGGGACAGAACTGGA
CTATCTGATTAGCCCCGTGGCTGATGTCAACGGAAACTTCTTCGACAGCAGACAGGC
ACCCAAAAATATGCCTCAGGATGCAGACGCCAACGGGGCCTACCACATCGGGCTGA
AGGGACTGATGCTGCTGGGCCGGATCAAGAACAATCAGGAGGGGAAGAAGCTGAAC
CTGGTCATTAAGAACGAGGAATACTTCGAGTTTGTCCAGAATAGAAATAACAAAAGG
CCGGCGGCCACGAAAAAGGCCGGCCAGGCAAAAAGAAAAGGGATCCTACCCATACG
ATGTTCCAGATTACGCTTATCCCTACGACGTGCCTGATTATGCATACCCATATG
ATGTCCCCGACTATGCC
5-Peregrinibacteria bacterium GW2011_GWA_33_10 (PeCpf1)
(SEQ ID NO: 217)
ATGTCCAACTTCTTTAAGAATTTCACCAACCTGTATGAGCTGTCCAAGAC
ACTGAGGTTTGAGCTGAAGCCCGTGGGCGACACCCTGACAAACATGAAGGACCACC
TGGAGTACGATGAGAAGCTGCAGACCTTCCTGAAGGATCAGAATATCGACGATGCCT
ATCAGGCCCTGAAGCCTCAGTTCGACGAGATCCACGAGGAGTTTATCACAGATTCTC
TGGAGAGCAAGAAGGCCAAGGAGATCGACTTCTCCGAGTACCTGGATCTGTTTCAGG
AGAAGAAGGAGCTGAACGACTCTGAGAAGAAGCTGCGCAACAAGATCGGCGAGAC
ATTCAACAAGGCCGGCGAGAAGTGGAAGAAGGAGAAGTACCCTCAGTATGAGTGGA
AGAAGGGCTCCAAGATCGCCAATGGCGCCGACATCCTGTCTTGCCAGGATATGCTGC
AGTTTATCAAGTATAAGAACCCAGAGGATGAGAAGATCAAGAATTACATCGACGAT
ACACTGAAGGGCTTCTTTACCTATTTCGGCGGCTTTAATCAGAACAGGGCCAACTAC
TATGAGACAAAGAAGGAGGCCTCCACCGCAGTGGCAACAAGGATCGTGCACGAGAA
CCTGCCAAAGTTCTGTGACAATGTGATCCAGTTTAAGCACATCATCAAGCGGAAGAA
GGATGGCACCGTGGAGAAAACCGAGAGAAAGACCGAGTACCTGAACGCCTACCAGT
ATCTGAAGAACAATAACAAGATCACACAGATCAAGGACGCCGAGACAGAGAAGATG
ATCGAGTCTACACCCATCGCCGAGAAGATCTTCGACGTGTACTACTTCAGCAGCTGC
CTGAGCCAGAAGCAGATCGAGGAGTACAACCGGATCATCGGCCACTATAATCTGCTG
ATCAACCTGTATAACCAGGCCAAGAGATCTGAGGGCAAGCACCTGAGCGCCAACGA
GAAGAAGTATAAGGACCTGCCTAAGTTCAAGACCCTGTATAAGCAGATCGGCTGCG
GCAAGAAGAAGGACCTGTTTTACACAATCAAGTGTGATACCGAGGAGGAGGCCAAT
AAGTCCCGGAACGAGGGCAAGGAGTCCCACTCTGTGGAGGAGATCATCAACAAGGC
CCAGGAGGCCATCAATAAGTACTTCAAGTCTAATAACGACTGTGAGAATATCAACAC
CGTGCCCGACTTCATCAACTATATCCTGACAAAGGAGAATTACGAGGGCGTGTATTG
GAGCAAGGCCGCCATGAACACCATCTCCGACAAGTACTTCGCCAATTATCACGACCT
GCAGGATAGACTGAAGGAGGCCAAGGTGTTTCAGAAGGCCGATAAGAAGTCCGAGG
ACGATATCAAGATCCCAGAGGCCATCGAGCTGTCTGGCCTGTTCGGCGTGCTGGACA
GCCTGGCCGATTGGCAGACCACACTGTTTAAGTCTAGCATCCTGAGCAACGAGGACA
AGCTGAAGATCATCACAGATTCCCAGACCCCCTCTGAGGCCCTGCTGAAGATGATCT
TCAATGACATCGAGAAGAACATGGAGTCCTTTCTGAAGGAGACAAACGATATCATCA
CCCTGAAGAAGTATAAGGGCAATAAGGAGGGCACCGAGAAGATCAAGCAGTGGTTC
GACTATACACTGGCCATCAACCGGATGCTGAAGTACTTTCTGGTGAAGGAGAATAAG
ATCAAGGGCAACTCCCTGGATACCAATATCTCTGAGGCCCTGAAAACCCTGATCTAC
AGCGACGATGCCGAGTGGTTCAAGTGGTACGACGCCCTGAGAAACTATCTGACCCAG
AAGCCTCAGGATGAGGCCAAGGAGAATAAGCTGAAGCTGAATTTCGACAACCCATC
TCTGGCCGGCGGCTGGGATGTGAACAAGGAGTGCAGCAATTTTTGCGTGATCCTGAA
GGACAAGAACGAGAAGAAGTACCTGGCCATCATGAAGAAGGGCGAGAATACCCTGT
TCCAGAAGGAGTGGACAGAGGGCCGGGGCAAGAACCTGACAAAGAAGTCTAATCCA
CTGTTCGAGATCAATAACTGCGAGATCCTGAGCAAGATGGAGTATGACTTTTGGGCC
GACGTGAGCAAGATGATCCCCAAGTGTAGCACCCAGCTGAAGGCCGTGGTGAACCA
CTTCAAGCAGTCCGACAATGAGTTCATCTTTCCTATCGGCTACAAGGTGACAAGCGG
CGAGAAGTTTAGGGAGGAGTGCAAGATCTCCAAGCAGGACTTCGAGCTGAATAACA
AGGTGTTTAATAAGAACGAGCTGAGCGTGACCGCCATGCGCTACGATCTGTCCTCTA
CACAGGAGAAGCAGTATATCAAGGCCTTCCAGAAGGAGTACTGGGAGCTGCTGTTTA
AGCAGGAGAAGCGGGACACCAAGCTGACAAATAACGAGATCTTCAACGAGTGGATC
AATTTTTGCAACAAGAAGTATAGCGAGCTGCTGTCCTGGGAGAGAAAGTACAAGGA
TGCCCTGACCAATTGGATCAACTTCTGTAAGTACTTTCTGAGCAAGTATCCCAAGACC
ACACTGTTCAACTACTCTTTTAAGGAGAGCGAGAATTATAACTCCCTGGACGAGTTC
TACCGGGACGTGGATATCTGTTCTTACAAGCTGAATATCAACACCACAATCAATAAG
AGCATCCTGGATAGACTGGTGGAGGAGGGCAAGCTGTACCTGTTTGAGATCAAGAAT
CAGGACAGCAACGATGGCAAGTCCATCGGCCACAAGAATAACCTGCACACCATCTA
CTGGAACGCCATCTTCGAGAATTTTGACAACAGGCCTAAGCTGAATGGCGAGGCCGA
GATCTTCTATCGCAAGGCCATCTCCAAGGATAAGCTGGGCATCGTGAAGGGCAAGAA
AACCAAGAACGGCACCGAGATCATCAAGAATTACAGATTCAGCAAGGAGAAGTTTA
TCCTGCACGTGCCAATCACCCTGAACTTCTGCTCCAATAACGAGTATGTGAATGACA
TCGTGAACACAAAGTTCTACAATTTTTCCAACCTGCACTTTCTGGGCATCGATAGGGG
CGAGAAGCACCTGGCCTACTATTCTCTGGTGAATAAGAACGGCGAGATCGTGGACCA
GGGCACACTGAACCTGCCTTTCACCGACAAGGATGGCAATCAGCGCAGCATCAAGA
AGGAGAAGTACTTTTATAACAAGCAGGAGGACAAGTGGGAGGCCAAGGAGGTGGAT
TGTTGGAATTATAACGACCTGCTGGATGCCATGGCCTCTAACCGGGACATGGCCAGA
AAGAATTGGCAGAGGATCGGCACCATCAAGGAGGCCAAGAACGGCTACGTGAGCCT
GGTCATCAGGAAGATCGCCGATCTGGCCGTGAATAACGAGCGCCCCGCCTTCATCGT
GCTGGAGGACCTGAATACAGGCTTTAAGCGGTCCAGACAGAAGATCGATAAGAGCG
TGTACCAGAAGTTCGAGCTGGCCCTGGCCAAGAAGCTGAACTTTCTGGTGGACAAGA
ATGCCAAGCGCGATGAGATCGGCTCCCCTACAAAGGCCCTGCAGCTGACCCCCCCTG
TGAATAACTACGGCGACATTGAGAACAAGAAGCAGGCCGGCATCATGCTGTATACC
CGGGCCAATTATACCTCTCAGACAGATCCAGCCACAGGCTGGAGAAAGACCATCTAT
CTGAAGGCCGGCCCCGAGGAGACAACATACAAGAAGGACGGCAAGATCAAGAACA
AGAGCGTGAAGGACCAGATCATCGAGACATTCACCGATATCGGCTTTGACGGCAAG
GATTACTATTTCGAGTACGACAAGGGCGAGTTTGTGGATGAGAAAACCGGCGAGATC
AAGCCCAAGAAGTGGCGGCTGTACTCCGGCGAGAATGGCAAGTCCCTGGACAGGTT
CCGCGGAGAGAGGGAGAAGGATAAGTATGAGTGGAAGATCGACAAGATCGATATCG
TGAAGATCCTGGACGATCTGTTCGTGAATTTTGACAAGAACATCAGCCTGCTGAAGC
AGCTGAAGGAGGGCGTGGAGCTGACCCGGAATAACGAGCACGGCACAGGCGAGTCC
CTGAGATTCGCCATCAACCTGATCCAGCAGATCCGGAATACCGGCAATAACGAGAG
AGACAACGATTTCATCCTGTCCCCAGTGAGGGACGAGAATGGCAAGCACTTTGACTC
TCGCGAGTACTGGGATAAGGAGACAAAGGGCGAGAAGATCAGCATGCCCAGCTCCG
GCGATGCCAATGGCGCCTTCAACATCGCCCGGAAGGGCATCATCATGAACGCCCACA
TCCTGGCCAATAGCGACTCCAAGGATCTGTCCCTGTTCGTGTCTGACGAGGAGTGGG
ATCTGCACCTGAATAACAAGACCGAGTGGAAGAAGCAGCTGAACATCTTTTCTAGCA
GGAAGGCCATGGCCAAGCGCAAGAAGAAAAGGCCGGCGGCCACGAAAAAGGCCGGCC
AGGCAAAAAGAAAAAGGGATCCTACCCATACGATGTTCCAGATTACGCTTATCCCT
ACGACGTGCCTGATTATGCATACCCATATGATGTCCCCGACTATGCCTAAGAAT
TC
6-Parcubacteria bacterium GWC2011_GWC2_44_17 (PbCpf1)
(SEQ ID NO: 218)
ATGGAGAACATCTTCGACCAGTTTATCGGCAAGTACAGCCTGTCCAAGAC
CCTGAGATTCGAGCTGAAGCCCGTGGGCAAGACAGAGGACTTCCTGAAGATCAACA
AGGTGTTTGAGAAGGATCAGACCATCGACGATAGCTACAATCAGGCCAAGTTCTATT
TTGATTCCCTGCACCAGAAGTTTATCGACGCCGCCCTGGCCTCCGATAAGACATCCG
AGCTGTCTTTCCAGAACTTTGCCGACGTGCTGGAGAAGCAGAATAAGATCATCCTGG
ATAAGAAGAGAGAGATGGGCGCCCTGAGGAAGCGCGACAAGAACGCCGTGGGCATC
GATAGGCTGCAGAAGGAGATCAATGACGCCGAGGATATCATCCAGAAGGAGAAGGA
GAAGATCTACAAGGACGTGCGCACCCTGTTCGATAACGAGGCCGAGTCTTGGAAAA
CCTACTATCAGGAGCGGGAGGTGGACGGCAAGAAGATCACCTTCAGCAAGGCCGAC
CTGAAGCAGAAGGGCGCCGATTTTCTGACAGCCGCCGGCATCCTGAAGGTGCTGAAG
TATGAGTTCCCCGAGGAGAAGGAGAAGGAGTTTCAGGCCAAGAACCAGCCCTCCCT
GTTCGTGGAGGAGAAGGAGAATCCTGGCCAGAAGAGGTACATCTTCGACTCTTTTGA
TAAGTTCGCCGGCTATCTGACCAAGTTTCAGCAGACAAAGAAGAATCTGTACGCAGC
AGACGGCACCAGCACAGCAGTGGCCACCCGCATCGCCGATAACTTTATCATCTTCCA
CCAGAATACCAAGGTGTTCCGGGACAAGTACAAGAACAATCACACAGACCTGGGCT
TCGATGAGGAGAACATCTTTGAGATCGAGAGGTATAAGAATTGCCTGCTGCAGCGCG
AGATCGAGCACATCAAGAATGAGAATAGCTACAACAAGATCATCGGCCGGATCAAT
AAGAAGATCAAGGAGTATCGGGACCAGAAGGCCAAGGATACCAAGCTGACAAAGTC
CGACTTCCCTTTCTTTAAGAACCTGGATAAGCAGATCCTGGGCGAGGTGGAGAAGGA
GAAGCAGCTGATCGAGAAAACCCGGGAGAAAACCGAGGAGGACGTGCTGATCGAGC
GGTTCAAGGAGTTCATCGAGAACAATGAGGAGAGGTTCACCGCCGCCAAGAAGCTG
ATGAATGCCTTCTGTAACGGCGAGTTTGAGTCCGAGTACGAGGGCATCTATCTGAAG
AATAAGGCCATCAACACAATCTCCCGGAGATGGTTCGTGTCTGACAGAGATTTTGAG
CTGAAGCTGCCTCAGCAGAAGTCCAAGAACAAGTCTGAGAAGAATGAGCCAAAGGT
GAAGAAGTTCATCTCCATCGCCGAGATCAAGAACGCCGTGGAGGAGCTGGACGGCG
ATATCTTTAAGGCCGTGTTCTACGACAAGAAGATCATCGCCCAGGGCGGCTCTAAGC
TGGAGCAGTTCCTGGTCATCTGGAAGTACGAGTTTGAGTATCTGTTCCGGGACATCG
AGAGAGAGAACGGCGAGAAGCTGCTGGGCTATGATAGCTGCCTGAAGATCGCCAAG
CAGCTGGGCATCTTCCCACAGGAGAAGGAGGCCCGCGAGAAGGCAACCGCCGTGAT
CAAGAATTACGCCGACGCCGGCCTGGGCATCTTCCAGATGATGAAGTATTTTTCTCT
GGACGATAAGGATCGGAAGAACACCCCCGGCCAGCTGAGCACAAATTTCTACGCCG
AGTATGACGGCTACTACAAGGATTTCGAGTTTATCAAGTACTACAACGAGTTTAGGA
ACTTCATCACCAAGAAGCCTTTCGACGAGGATAAGATCAAGCTGAACTTTGAGAATG
GCGCCCTGCTGAAGGGCTGGGACGAGAACAAGGAGTACGATTTCATGGGCGTGATC
CTGAAGAAGGAGGGCCGCCTGTATCTGGGCATCATGCACAAGAACCACCGGAAGCT
GTTTCAGTCCATGGGCAATGCCAAGGGCGACAACGCCAATAGATACCAGAAGATGA
TCTATAAGCAGATCGCCGACGCCTCTAAGGATGTGCCCAGGCTGCTGCTGACCAGCA
AGAAGGCCATGGAGAAGTTCAAGCCTTCCCAGGAGATCCTGAGAATCAAGAAGGAG
AAAACCTTCAAGCGGGAGAGCAAGAACTTTCCCTGAGAGATCTGCACGCCCTGATC
GAGTACTATAGGAACTGCATCCCTCAGTACAGCAATTGGTCCTTTTATGACTTCCAGT
TTCAGGATACCGGCAAGTACCAGAATATCAAGGAGTTCACAGACGATGTGCAGAAG
TACGGCTATAAGATCTCCTTTCGCGACATCGACGATGAGTATATCAATCAGGCCCTG
AACGAGGGCAAGATGTACCTGTTCGAGGTGGTGAACAAGGATATCTATAACACCAA
GAATGGCTCCAAGAATCTGCACACACTGTACTTTGAGCACATCCTGTCTGCCGAGAA
CCTGAATGACCCAGTGTTCAAGCTGTCTGGCATGGCCGAGATCTTTCAGCGGCAGCC
CAGCGTGAACGAAAGAGAGAAGATCACCACACAGAAGAATCAGTGTATCCTGGACA
AGGGCGATAGAGCCTACAAGTATAGGCGCTACACCGAGAAGAAGATCATGTTCCAC
ATGAGCCTGGTGCTGAACACAGGCAAGGGCGAGATCAAGCAGGTGCAGTTTAATAA
GATCATCAACCAGAGGATCAGCTCCTCTGACAACGAGATGAGGGTGAATGTGATCG
GCATCGATCGCGGCGAGAAGAACCTGCTGTACTATAGCGTGGTGAAGCAGAATGGC
GAGATCATCGAGCAGGCCTCCCTGAACGAGATCAATGGCGTGAACTACCGGGACAA
GCTGATCGAGAGGGAGAAGGAGCGCCTGAAGAACCGGCAGAGCTGGAAGCCTGTGG
TGAAGATCAAGGATCTGAAGAAGGGCTACATCTCCCACGTGATCCACAAGATCTGCC
AGCTGATCGAGAAGTATTCTGCCATCGTGGTGCTGGAGGACCTGAATATGAGATTCA
AGCAGATCAGGGGAGGAATCGAGCGGAGCGTGTACCAGCAGTTCGAGAAGGCCCTG
ATCGATAAGCTGGGCTATCTGGTGTTTAAGGACAACAGGGATCTGAGGGCACCAGG
AGGCGTGCTGAATGGCTACCAGCTGTCTGCCCCCTTTGTGAGCTTCGAGAAGATGCG
CAAGCAGACCGGCATCCTGTTCTACACACAGGCCGAGTATACCAGCAAGACAGACC
CAATCACCGGCTTTCGGAAGAACGTGTATATCTCTAATAGCGCCTCCCTGGATAAGA
TCAAGGAGGCCGTGAAGAAGTTCGACGCCATCGGCTGGGATGGCAAGGAGCAGTCT
TACTTCTTTAAGTACAACCCTTACAACCTGGCCGACGAGAAGTATAAGAACTCTACC
GTGAGCAAGGAGTGGGCCATCTTTGCCAGCGCCCCAAGAATCCGGAGACAGAAGGG
CGAGGACGGCTACTGGAAGTATGATAGGGTGAAAGTGAATGAGGAGTTCGAGAAGC
TGCTGAAGGTCTGGAATTTTGTGAACCCAAAGGCCACAGATATCAAGCAGGAGATCA
TCAAGAAGGAGAAGGCAGGCGACCTGCAGGGAGAGAAGGAGCTGGATGGCCGGCT
GAGAAACTTTTGGCACTCTTTCATCTACCTGTTTAACCTGGTGCTGGAGCTGCGCAAT
TCTTTCAGCCTGCAGATCAAGATCAAGGCAGGAGAAGTGATCGCAGTGGACGAGGG
CGTGGACTTCATCGCCAGCCCAGTGAAGCCCTTCTTTACCACACCCAACCCTTACATC
CCCTCCAACCTGTGCTGGCTGGCCGTGGAGAATGCAGACGCAAACGGAGCCTATAAT
ATCGCCAGGAAGGGCGTGATGATCCTGAAGAAGATCCGCGAGCACGCCAAGAAGGA
CCCCGAGTTCAAGAAGCTGCCAAACCTGTTTATCAGCAATGCAGAGTGGGACGAGGC
AGCCCGGGATTGGGGCAAGTACGCAGGCACCACAGCCCTGAACCTGGACCACAAAAG
GCCGGCGGCCACGAAAAAGGCCGGCCAGGCAAAAAGAAAAAGGGATCCTACCCATAC
GATGTTCCAGATTACGCTTATCCCTACGACGTGCCTGATTATGCATACCCATAT
GATGTCCCCGACTATGCCTAAGAATTC

[chemical structure]

(SEQ ID NO: 219)
ATGCAGACCCTGTTTGAGAACTTCACAAATCAGTACCCAGTGTCCAAGAC
CCTGCGCTTTGAGCTGATCCCCCAGGGCAAGACAAAGGACTTCATCGAGCAGAAGG
GCCTGCTGAAGAAGGATGAGGACCGGCCGAGAAGTATAAGAAGGTGAAGAACATC
ATCGATGAGTACCACAAGGACTTCATCGAGAAGTCTCTGAATGGCCTGAAGCTGGAC
GGCCTGGAGAAGTACAAGACCCTGTATCTGAAGCAGGAGAAGGACGATAAGGATAA
GAAGGCCTTTGACAAGGAGAAGGAGAACCTGCGCAAGCAGATCGCCAATGCCTTCC
GGAACAATGAGAAGTTTAAGACACTGTTCGCCAAGGAGCTGATCAAGAACGATCTG
ATGTCTTTCGCCTGCGAGGAGGACAAGAAGAATGTGAAGGAGTTTGAGGCCTTCACC
ACATACTTCACCGGCTTCCACCAGAACCGCGCCAATATGTACGTGGCCGATGAGAAG
AGAACAGCCATCGCCAGCAGGCTGATCCACGAGAACCTGCCAAAGTTTATCGACAAT
ATCAAGATCTTCGAGAAGATGAAGAAGGAGGCCCCCGAGCTGCTGTCTCCTTTCAAC
CAGACCCTGAAGGATATGAAGGACGTGATCAAGGGCACCACACTGGAGGAGATCTT
TAGCCTGGATTATTTCAACAAGACCCTGACACAGAGCGGCATCGACATCTACAATTC
CGTGATCGGCGGCAGAACCCCTGAGGAGGGCAAGACAAAGATCAAGGGCCTGAACG
AGTACATCAATACCGACTTCAACCAGAAGCAGACAGACAAGAAGAAGCGGCAGCCA
AAGTTCAAGCAGCTGTATAAGCAGATCCTGAGCGATAGGCAGAGCCTGTCCTTTATC
GCCGAGGCCTTCAAGAACGACACCGAGATCCTGGAGGCCATCGAGAAGTTTTACGTG
AATGAGCTGCTGCACTTCAGCAATGAGGGCAAGTCCACAAACGTGCTGGACGCCATC
AAGAATGCCGTGTCTAACCTGGAGAGCTTTAACCTGACCAAGATGTATTTCCGCTCC
GGCGCCTCTCTGACAGACGTGAGCCGGAAGGTGTTTGGCGAGTGGAGCATCATCAAT
AGAGCCCTGGACAACTACTATGCCACCACATATCCAATCAAGCCCAGAGAGAAGTCT
GAGAAGTACGAGGAGAGGAAGGAGAAGTGGCTGAAGCAGGACTTCAACGTGAGCCT
GATCCAGACCGCCATCGATGAGTACGACAACGAGACAGTGAAGGGCAAGAACAGCG
GCAAAGTGATCGCCGATTATTTTGCCAAGTTCTGCGACGATAAGGAGACAGACCTGA
TCCAGAAGGTGAACGAGGGCTACATCGCCGTGAAGGATCTGCTGAATACACCCTGTC
CTGAGAACGAGAAGCTGGGCAGCAATAAGGACCAGGTGAAGCAGATCAAGGCCTTT
ATGGATTCTATCATGGACATCATGCACTTCGTGCGCCCCCTGAGCCTGAAGGATACC
GACAAGGAGAAGGATGAGACATTCTACTCCCTGTTCACACCTCTGTACGACCACCTG
ACCCAGACAATCGCCCTGTATAACAAGGTGCGGAACTATCTGACCCAGAAGCCTTAC
AGCACAGAGAAGATCAAGCTGAACTTCGAGAACAGCACCCTGCTGGGCGGCTGGGA
TCTGAATAAGGAGACAGACAACACAGCCATCATCCTGAGGAAGGATAACCTGTACT
ATCTGGGCATCATGGACAAGAGGCACAATCGCATCTTTCGGAACGTGCCCAAGGCCG
ATAAGAAGGACTTCTGCTACGAGAAGATGGTGTATAAGCTGCTGCCTGGCGCCAACA
AGATGCTGCCAAAGGTGTTCTTTTCTCAGAGCAGAATCCAGGAGTTTACCCCTTCCGC
CAAGCTGCTGGAGAACTACGCCAATGAGACACACAAGAAGGGCGATAATTTCAACC
TGAATCACTGTCACAAGCTGATCGATTTCTTTAAGGACTCTATCAACAAGCACGAGG
ATTGGAAGAATTTCGACTTTAGGTTCAGCGCCACCTCCACCTACGCCGACCTGAGCG
GCTTTTACCACGAGGTGGAGCACCAGGGCTACAAGATCTCTTTTCAGAGCGTGGCCG
ATTCCTTCATCGACGATCTGGTGAACGAGGGCAAGCTGTACCTGTTCCAGATCTATA
ATAAGGACTTTTCCCCATTCTCTAAGGGCAAGCCCAACCTGCACACCCTGTACTGGA
AGATGCTGTTTGATGAGAACAATCTGAAGGACGTGGTGTATAAGCTGAATGGCGAG
GCCGAGGTGTTCTACCGCAAGAAGAGCATTGCCGAGAAGAACACCACAATCCACAA
GGCCAATGAGTCCATCATCAACAAGAATCCTGATAACCCAAAGGCCACCAGCACCTT
CAACTATGATATCGTGAAGGACAAGAGATACACCATCGACAAGTTTCAGTTCCACAT
CCCAATCACAATGAACTTTAAGGCCGAGGGCATCTTCAACATGAATCAGAGGGTGAA
TCAGTTCCTGAAGGCCAATCCCGATATCAACATCATCGGCATCGACAGAGGCGAGAG
GCACCTGCTGTACTATGCCCTGATCAACCAGAAGGGCAAGATCCTGAAGCAGGATAC
CCTGAATGTGATCGCCAACGAGAAGCAGAAGGTGGACTACCACAATCTGCTGGATA
AGAAGGAGGGCGACCGCGCAACCGCAAGGCAGGAGTGGGGCGTGATCGAGACAAT
CAAGGAGCTGAAGGAGGGCTATCTGTCCCAGGTCATCCACAAGCTGACCGATCTGAT
GATCGAGAACAATGCCATCATCGTGATGGAGGACCTGAACTTTGGCTTCAAGCGGGG
CAGACAGAAGGTGGAGAAGCAGGTGTATCAGAAGTTTGAGAAGATGCTGATCGATA
AGCTGAATTACCTGGTGGACAAGAATAAGAAGGCAAACGAGCTGGGAGGCCTGCTG
AACGCATTCCAGCTGGCCAATAAGTTTGAGTCCTTCCAGAAGATGGGCAAGCAGAAC
GGCTTTATCTTCTACGTGCCCGCCTGGAATACCTCTAAGACAGATCCTGCCACCGGCT
TTATCGACTTCCTGAAGCCCCGCTATGAGAACCTGAATCAGGCCAAGGATTTCTTTG
AGAAGTTTGACTCTATCCGGCTGAACAGCAAGGCCGATTACTTTGAGTTCGCCTTTG
ACTTCAAGAATTTCACCGAGAAGGCCGATGGCGGCAGAACCAAGTGGACAGTGTGC
ACCACAAACGAGGACAGATATGCCTGGAATAGGGCCCTGAACAATAACAGGGGCAG
CCAGGAGAAGTACGACATCACAGCCGAGCTGAAGTCCCTGTTCGATGGCAAGGTGG
ACTATAAGTCTGGCAAGGATCTGAAGCAGCAGATCGCCAGCCAGGAGTCCGCCGAC
TTCTTTAAGGCCCTGATGAAGAACCTGTCCATCACCCTGTCTCTGAGACACAATAAC
GGCGAGAAGGGCGATAATGAGCAGGACTACATCCTGTCCCCTGTGGCCGATTCTAAG
GGCCGCTTCTTTGACTCCCGGAAGGCCGACGATGACATGCCAAAGAATGCCGACGCC
AACGGCGCCTATCACATCGCCCTGAAGGGCCTGTGGTGTCTGGAGCAGATCAGCAAG
ACCGATGACCTGAAGAAGGTGAAGCTGGCCATCTCCAACAAGGAGTGGCTGGAGTT
CGTGCAGACACTGAAGGGCAAAAGGCCGGCGGCCACGAAAAAGGCCGGCCAGGCAAAA
AAGAAAAAGGGATCCTACCCATACGATGTTCCAGATTACGCTTATCCCTACGACGT
GCCTGATTATGCATACCCATATGATGTCCCCGACTATGCCTAAGAATTC

[chemical structure]

(SEQ ID NO: 220)
ATGACACAGTTCGAGGGCTTTACCAACCTGTATCAGGTGAGCAAG
ACACTGCGGTTTGAGCTGATCCCACAGGGCAAGACCCTGAAGCACATCCAGG
AGCAGGGCTTCATCGAGGAGGACAAGGCCCGCAATGATCACTACAAGGAGC
TGAAGCCCATCATCGATCGGATCTACAAGACCTATGCCGACCAGTGCCTGCA
GCTGGTGCAGCTGGATTGGGAGAACCTGAGCGCCGCCATCGACTCCTATAGA
AAGGAGAAAACCGAGGAGACAAGGAACGCCCTGATCGAGGAGCAGGCCACA
TATCGCAATGCCATCCACGACTACTTCATCGGCCGGACAGACAACCTGACCG
ATGCCATCAATAAGAGACACGCCGAGATCTACAAGGGCCTGTTCAAGGCCGA
GCTGTTTAATGGCAAGGTGCTGAAGCAGCTGGGCACCGTGACCACAACCGAG
CACGAGAACGCCCTGCTGCGGAGCTTCGACAAGTTTACAACCTACTTCTCCG
GCTTTTATGAGAACAGGAAGAACGTGTTCAGCGCCGAGGATATCAGCACAGC
CATCCCACACCGCATCGTGCAGGACAACTTCCCCAAGTTTAAGGAGAATTGT
CACATCTTCACACGCCTGATCACCGCCGTGCCCAGCCTGCGGGAGCACTTTG
AGAACGTGAAGAAGGCCATCGGCATCTTCGTGAGCACCTCCATCGAGGAGGT
GTTTTCCTTCCCTTTTTATAACCAGCTGCTGACACAGACCCAGATCGACCTGT
ATAACCAGCTGCTGGGAGGAATCTCTCGGGAGGCAGGCACCGAGAAGATCA
AGGGCCTGAACGAGGTGCTGAATCTGGCCATCCAGAAGAATGATGAGACAG
CCCACATCATCGCCTCCCTGCCACACAGATTCATCCCCCTGTTTAAGCAGATC
CTGTCCGATAGGAACACCCTGTCTTTCATCCTGGAGGAGTTTAAGAGCGACG
AGGAAGTGATCCAGTCCTTCTGCAAGTACAAGACACTGCTGAGAAACGAGAA
CGTGCTGGAGACAGCCGAGGCCCTGTTTAACGAGCTGAACAGCATCGACCTG
ACACACATCTTCATCAGCCACAAGAAGCTGGAGACAATCAGCAGCGCCCTGT
GCGACCACTGGGATACACTGAGGAATGCCCTGTATGAGCGGAGAATCTCCGA
GCTGACAGGCAAGATCACCAAGTCTGCCAAGGAGAAGGTGCAGCGCAGCCT
GAAGCACGAGGATATCAACCTGCAGGAGATCATCTCTGCCGCAGGCAAGGA
GCTGAGCGAGGCCTTCAAGCAGAAAAACCAGCGAGATCCTGTCCCACGCACAC
GCCGCCCTGGATCAGCCACTGCCTACAACCCTGAAGAAGCAGGAGGAGAAG
GAGATCCTGAAGTCTCAGCTGGACAGCCTGCTGGGCCTGTACCACCTGCTGG
ACTGGTTTGCCGTGGATGAGTCCAACGAGGTGGACCCCGAGTTCTCTGCCCG
GCTGACCGGCATCAAGCTGGAGATGGAGCCTTCTCTGAGCTTCTACAACAAG
GCCAGAAATTATGCCACCAAGAAGCCCTACTCCGTGGAGAAGTTCAAGCTGA
ACTTTCAGATGCCTACACTGGCCTCTGGCTGGGACGTGAATAAGGAGAAGAA
CAATGGCGCCATCCTGTTTGTGAAGAACGGCCTGTACTATCTGGGCATCATGC
CAAAGCAGAAGGGCAGGTATAAGGCCCTGAGCTTCGAGCCCACAGAGAAAA
CCAGCGAGGGCTTTGATAAGATGTACTATGACTACTTCCCTGATGCCGCCAA
GATGATCCCAAAGTGCAGCACCCAGCTGAAGGCCGTGACAGCCCACTTTCAG
ACCCACACAACCCCCATCCTGCTGTCCAACAATTTCATCGAGCCTCTGGAGAT
CACAAAGGAGATCTACGACCTGAACAATCCTGAGAAGGAGCCAAAGAAGTT
TCAGACAGCCTACGCCAAGAAAACCGGCGACCAGAAGGGCTACAGAGAGGC
CCTGTGCAAGTGGATCGACTTCACAAGGGATTTTCTGTCCAAGTATACCAAG
ACAACCTCTATCGATCTGTCTAGCCTGCGGCCATCCTCTCAGTATAAGGACCT
GGGCGAGTACTATGCCGAGCTGAATCCCCTGCTGTACCACATCAGCTTCCAG
AGAATCGCCGAGAAGGAGATCATGGATGCCGTGGAGACAGGCAAGCTGTAC
CTGTTCCAGATCTATAACAAGGACTTTGCCAAGGGCCACCACGGCAAGCCTA
ATCTGCACACACTGTATTGGACCGGCCTGTTTTCTCCAGAGAACCTGGCCAAG
ACAAGCATCAAGCTGAATGGCCAGGCCGAGCTGTTCTACCGCCCTAAGTCCA
GGATGAAGAGGATGGCACACCGGCTGGGAGAGAAGATGCTGAACAAGAAGC
TGAAGGATCAGAAAACCCCAATCCCCGACACCCTGTACCAGGAGCTGTACGA
CTATGTGAATCACAGACTGTCCCACGACCTGTCTGATGAGGCCAGGGCCCTG
CTGCCCAACGTGATCACCAAGGAGGTGTCTCACGAGATCATCAAGGATAGGC
GCTTTACCAGCGACAAGTTCTTTTTCCACGTGCCTATCACACTGAACTATCAG
GCCGCCAATTCCCCATCTAAGTTCAACCAGAGGGTGAATGCCTACCTGAAGG
AGCACCCCGAGACACCTATCATCGGCATCGATCGGGGCGAGAGAAACCTGAT
CTATATCACAGTGATCGACTCCACCGGCAAGATCCTGGAGCAGCGGAGCCTG
AACACCATCCAGCAGTTTGATTACCAGAAGAAGCTGGACAACAGGGAGAAG
GAGAGGGTGGCAGCAAGGCAGGCCTGGTCTGTGGTGGGCACAATCAAGGAT
CTGAAGCAGGGCTATCTGAGCCAGGTCATCCACGAGATCGTGGACCTGATGA
TCCACTACCAGGCCGTGGTGGTGCTGGAGAACCTGAATTTCGGCTTTAAGAG
CAAGAGGACCGGCATCGCCGAGAAGGCCGTGTACCAGCAGTTCGAGAAGAT
GCTGATCGATAAGCTGAATTGCCTGGTGCTGAAGGACTATCCAGCAGAGAAA
GTGGGAGGCGTGCTGAACCCATACCAGCTGACAGACCAGTTCACCTCCTTTG
CCAAGATGGGCACCCAGTCTGGCTTCCTGTTTTACGTGCCTGCCCCATATACA
TCTAAGATCGATCCCCTGACCGGCTTCGTGGACCCCTTCGTGTGGAAAACCAT
CAAGAATCACGAGAGCCGCAAGCACTTCCTGGAGGGCTTCGACTTTCTGCAC
TACGACGTGAAAACCGGCGACTTCATCCTGCACTTTAAGATGAACAGAAATC
TGTCCTTCCAGAGGGGCCTGCCCGGCTTTATGCCTGCATGGGATATCGTGTTC
GAGAAGAACGAGACACAGTTTGACGCCAAGGGCACCCCTTTCATCGCCGGCA
AGAGAATCGTGCCAGTGATCGAGAATCACAGATTCACCGGCAGATACCGGGA
CCTGTATCCTGCCAACGAGCTGATCGCCCTGCTGGAGGAGAAGGGCATCGTG
TTCAGGGATGGCTCCAACATCCTGCCAAAGCTGCTGGAGAATGACGATTCTC
ACGCCATCGACACCATGGTGGCCCTGATCCGCAGCGTGCTGCAGATGCGGAA
CTCCAATGCCGCCACAGGCGAGGACTATATCAACAGCCCCGTGCGCGATCTG
AATGGCGTGTGCTTCGACTCCCGGTTTCAGAACCCAGAGTGGCCCATGGACG
CCGATGCCAATGGCGCCTACCACATCGCCCTGAAGGGCCAGCTGCTGCTGAA
TCACCTGAAGGAGAGCAAGGATCTGAAGCTGCAGAACGGCATCTCCAATCAG
GACTGGCTGGCCTACATCCAGGAGCTGCGCAACAAAAGGCCGGCGGCCACGA
AAAAGGCCGGCCAGGCAAAAAAGAAAAAGGGATCCTACCCATACGATGTTCCA
GATTACGCTTATCCCTACGACGTGCCTGATTATGCATACCCATATGATGT
CCCCGACTATGCCTAAGAATTC
9-Lachnospiraceae bacterium MA2020 (Lb2Cpf1)
(SEQ ID NO: 221)
ATGTACTATGAGTCCCTGAQCCAAGCAGTACCCCGTGTCTAAGACAATCCG
GAATGAGCTGATCCCTATCGGCAAGACACTGGATAACATCCGCCAGAACAATATCCT
GGAGAGCGACGTGAAGCGGAAGCAGAACTACGAGCACGTGAAGGGCATCCTGGATG
AGTATCACAAGCAGCTGATCAACGAGGCCCTGGACAATTGCACCCTGCCATCCCTGA
AGATCGCCGCCGAGATCTACCTGAAGAATCAGAAGGAGGTGTCTGACAGAGAGGAT
TTCAACAAGACACAGGACCTGCTGAGGAAGGAGGTGGTGGAGAAGCTGAAGGCCCA
CGAGAACTTTACCAAGATCGGCAAGAAGGACATCCTGGATCTGCTGGAGAAGCTGC
CTTCCATCTCTGAGGACGATTACAATGCCCTGGAGAGCTTCCGCAACTTTTACACCTA
TTTCACATCCTACAACAAGGTGCGGGAGAATCTGTATTCTGATAAGGAGAAGAGCTC
CACAGTGGCCTACAGACTGATCAACGAGAATTTCCCAAAGTTTCTGGACAATGTGAA
GAGCTATAGGTTTGTGAAAACCGCAGGCATCCTGGCAGATGGCCTGGGAGAGGAGG
AGCAGGACTCCCTGTTCATCGTGGAGACATTCAACAAGACCCTGACACAGGACGGCA
TCGATACCTACAATTCTCAAGTGGGCAAGATCAACTCTAGCATCAATCTGTATAACC
AGAAGAATCAGAAGGCCAATGGCTTCAGAAAGATCCCCAAGATGAAGATGCTGTAT
AAGCAGATCCTGTCCGATAGGGAGGAGTCTTTCATCGACGAGTTTCAGAGCGATGAG
GTGCTGATCGACAACGTGGAGTCTTATGGCAGCGTGCTGATCGAGTCTCTGAAGTCC
TCTAAGGTGAGCGCCTTCTTTGATGCCCTGAGAGAGTCTAAGGGCAAGAACGTGTAC
GTGAAGAATGACCTGGCCAAGACAGCCATGAGCAACATCGTGTTCGAGAATTGGAG
GACCTTTGACGATCTGCTGAACCAGGAGTACGACCTGGCCAACGAGAACAAGAAGA
AGGACGATAAGTATTTCGAGAAGCGCCAGAAGGAGCTGAAGAAGAATAAGAGCTAC
TCCCTGGAGCACCTGTGCAACCTGTCCGAGGATTCTTGTAACCTGATCGAGAATTAT
ATCCACCAGATCTCCGACGATATCGAGAATATCATCATCAACAATGAGACATTCCTG
CGCATCGTGATCAATGAGCACGACAGGTCCCGCAAGCTGGCCAAGAACCGGAAGGC
CGTGAAGGCCATCAAGGACTTTCTGGATTCTATCAAGGTGCTGGAGCGGGAGCTGAA
GCTGATCAACAGCTCCGGCCAGGAGCTGGAGAAGGATCTGATCGTGTACTCTGCCCA
CGAGGAGCTGCTGGTGGAGCTGAAGCAGGTGGACAGCCTGTATAACATGACCAGAA
ATTATCTGACAAAGAAGCCTTTCTCTACCGAGAAGGTGAAGCTGAACTTTAATCGCA
GCACACTGCTGAACGGCTGGGATCGGAATAAGGAGACAGACAACCTGGGCGTGCTG
CTGCTGAAGGACGGCAAGTACTATCTGGGCATCATGAACACAAGCGCCAATAAGGC
CTTCGTGAATCCCCCTGTGGCCAAGACCGAGAAGGTGTTTAAGAAGGTGGATTACAA
GCTGCTGCCAGTGCCCAACCAGATGCTGCCAAAGGTGTTCTTTGCCAAGAGCAATAT
CGACTTCTATAACCCCTCTAGCGAGATCTACTCCAATTATAAGAAGGGCACCCACAA
GAAGGGCAATATGTTTTCCCTGGAGGATTGTCACAACCTGATCGACTTCTTTAAGGA
GTCTATCAGCAAGCACGAGGACTGGAGCAAGTTCGGCTTTAAGTTCAGCGATACAGC
CTCCTACAACGACATCTCCGAGTTCTATCGCGAGGTGGAGAAGCAGGGCTACAAGCT
GACCTATACAGACATCGATGAGACATACATCAATGATCTGATCGAGCGGAACGAGCT
GTACCTGTTCCAGATCTATAATAAGGACTTTAGCATGTACTCCAAGGGCAAGCTGAA
CCTGCACACACTGTATTTCATGATGCTGTTTGATCAGCGCAATATCGACGACGTGGTG
TATAAGCTGAACGGAGAGGCAGAGGTGTTCTATAGGCCAGCCTCCATCTCTGAGGAC
GAGCTGATCATCCACAAGGCCGGCGAGGAGATCAAGAACAAGAATCCTAACCGGGC
CAGAACCAAGGAGACAAGCACCTTCAGCTACGACATCGTGAAGGATAAGCGGTATA
GCAAGGATAAGTTTACCCTGCACATCCCCATCACAATGAACTTCGGCGTGGATGAGG
TGAAGCGGTTCAACGACGCCGTGAACAGCGCCATCCGGATCGATGAGAATGTGAAC
GTGATCGGCATCGACCGGGGCGAGAGAAATCTGCTGTACGTGGTGGTCATCGACTCT
AAGGGCAACATCCTGGAGCAGATCTCCCTGAACTCTATCATCAATAAGGAGTACGAC
ATCGAGACAGATTATCACGCACTGCTGGATGAGAGGGAGGGCGGCAGAGATAAGGC
CCGGAAGGACTGGAACACCGTGGAGAATATCAGGGACCTGAAGGCCGGCTACCTGA
GCCAGGTGGTGAACGTGGTGGCCAAGCTGGTGCTGAAGTATAATGCCATCATCTGCC
TGGAGGACCTGAACTTTGGCTTCAAGAGGGGCCGCCAGAAGGTGGAGAAGCAGGTG
TACCAGAAGTTCGAGAAGATGCTGATCGATAAGCTGAATTACCTGGTCATCGACAAG
AGCCGCGAGCAGACATCCCCTAAGGAGCTGGGAGGCGCCCTGAACGCACTGCAGCT
GACCTCTAAGTTCAAGAGCTTTAAGGAGCTGGGCAAGCAGTCCGGCGTGATCTACTA
TGTGCCTGCCTACCTGACCTCTAAGATCGATCCAACCACAGGCTTCGCCAATCTGTTT
TATATGAAGTGTGAGAACGTGGAGAAGTCCAAGAGATTCTTTGACGGCTTTGATTTC
ATCAGGTTCAACGCCCTGGAGAACGTGTTCGAGTTCGGCTTTGACTACCGGAGCTTC
ACCCAGAGGGCCTGCGGCATCAATTCCAAGTGGACCGTGTGCACCAACGGCGAGCG
CATCATCAAGTATCGGAATCCAGATAAGAACAATATGTTCGACGAGAAGGTGGTGGT
GGTGACCGATGAGATGAAGAACCTGTTTGAGCAGTACAAGATCCCCTATGAGGATG
GCAGAAATGTGAAGGACATGATCATCAGCAACGAGGAGGCCGAGTTCTACCGGAGA
CTGTATAGGCTGCTGCAGCAGACCCTGCAGATGAGAAACAGCACCTCCGACGGCAC
AAGGGATTACATCATCTCCCCTGTGAAGAATAAGAGAGAGGCCTACTTCAACAGCGA
GCTGTCCGACGGCTCTGTGCCAAAGGACGCCGATGCCAACGGCGCCTACAATATCGC
CAGAAAGGGCCTGTGGTGCTGGAGCAGATCAGGCAGAAGAGCGAGGGCGAGAAG
ATCAATCTGGCCATGACCAACGCCGAGTGGCTGGAGTATGCCCAGACACACCTGCTG
AAAAGGCCGGCGGCCACGAAAAAGGCCGGCCAGGCAAAAAAGAAAAAGGGATCCTACC
CATACGATGTTCCAGATTACGCTTATCCCTACGACGTGCCTGATTATGCATACC
CATATGATGTCCCCGACTATGCCTAAGAATTC
10-Candidatus Methanoplasma termitum (CMtCpf1)
(SEQ ID NO: 222)
ATGAACAATTACGACGAGTTCACCAAGCTGTATCCTATCCAGAAAACCAT
CCGGTTTGAGCTGAAGCCACAGGGCAGAACCATGGAGCACCTGGAGACATTCAACTT
CTTTGAGGAGGACCGGGATAGAGCCGAGAAGTATAAGATCCTGAAGGAGGCCATCG
ACGAGTACCACAAGAAGTTTATCGATGAGCACCTGACCAATATGTCCCTGGATTGGA
ACTCTCTGAAGCAGATCAGCGAGAAGTACTATAAGAGCAGGGAGGAGAAGGACAAG
AAGGTGTTCCTGTCCGAGCAGAAGAGGATGCGCCAGGAGATCGTGTCTGAGTTTAAG
AAGGACGATCGCTTCAAGGACCTGTTTTCCAAGAAGCTGTTCTCTGAGCTGCTGAAG
GAGGAGATCTACAAGAAGGGCAACCACCAGGAGATCGACGCCCTGAAGAGCTTCGA
TAAGTTTTCCGGCTATTTCATCGGCCTGCACGAGAATAGGAAGAACATGTACTCCGA
CGGCGATGAGATCACCGCCATCTCCAATCGCATCGTGAATGAGAACTTCCCCAAGTT
TCTGGATAACCTGCAGAAGTACCAGGAGGCCAGGAAGAAGTATCCTGAGTGGATCA
TCAAGGCCGAGAGCGCCCTGGTGGCCCACAATATCAAGATGGACGAGGTGTTCTCCC
TGGAGTACTTTAATAAGGTGCTGAACCAGGAGGGCATCCAGCGGTACAACCTGGCCC
TGGGCGGCTATGTGACCAAGAGCGGCGAGAAGATGATGGGCCTGAATGATGCCCTG
AACCTGGCCCACCAGTCCGAGAAGAGCTCCAAGGGCAGAATCCACATGACCCCCT
GTTCAAGCAGATCCTGTCCGAGAAGGAGTCCTTCTCTTACATCCCCGACGTGTTTACA
GAGGATTCTCAGCTGCTGCCTAGCATCGGCGGCTTCTTTGCCCAGATCGAGAATGAC
AAGGATGGCAACATCTTCGACCGGGCCCTGGAGCTGATCTCTAGCTACGCCGAGTAT
GATACCGAGCGGATCTATATCAGACAGGCCGACATCAATAGAGTGTCCAACGTGATC
TTTGGAGAGTGGGGCACCCTGGGAGGCCTGATGAGGGAGTACAAGGCCGACTCTAT
CAATGATATCAACCTGGAGCGCACATGCAAGAAGGTGGACAAGTGGCTGGATTCTA
AGGAGTTTGCCCTGAGCGATGTGCTGGAGGCCATCAAGAGGACCGGCAACAATGAC
GCCTTCAACGAGTATATCTCCAAGATGCGGACAGCCAGAGAGAAGATCGATGCCGC
CCGCAAGGAGATGAAGTTCATCAGCGAGAAGATCTCCGGCGATGAGGAGTCTATCC
ACATCATCAAGACCCTGCTGGACAGCGTGCAGCAGTTCCTGCACTTCTTTAATCTGTT
TAAGGCAAGGCAGGACATCCCACTGGATGGAGCCTTCTACGCCGAGTTTGACGAGGT
GCACAGCAAGCTGTTTGCCATCGTGCCCCTGTATAACAAGGTGCGGAACTATCTGAC
CAAGAACAATCTGAACACAAAGAAGATCAAGCTGAATTTCAAGAACCCTACACTGG
CCAATGGCTGGGACCAGAACAAGGTGTACGATTATGCCTCCCTGATCTTTCTGCGGG
ACGGCAATTACTATCTGGGCATCATCAATCCTAAGAGAAAGAAGAACATCAAGTTCG
AGCAGGGCTCTGGCAACGGCCCCTTCTACCGGAAGATGGTGTATAAGCAGATCCCCG
GCCCTAATAAGAACCTGCCAAGAGTGTTCCTGACCTCCACAAAGGGCAAGAAGGAG
TATAAGCCCTCTAAGGAGATCATCGAGGGCTACGAGGCCGACAAGCACATCAGGGG
CGATAAGTTCGACCTGGATTTTTGTCACAAGCTGATCGATTTCTTTAAGGAGTCCATC
GAGAAGCACAAGGACTGGTCTAAGTTCAACTTCTACTTCAGCCCAACCGAGAGCTAT
GGCGACATCTCTGAGTTCTACCTGGATGTGGAGAAGCAGGGCTATCGCATGCACTTT
GAGAATATCAGCGCCGAGACAATCGACGAGTATGTGGAGAAGGGCGATCTGTTTCT
GTTCCAGATCTACAACAAGGATTTTGTGAAGGCCGCCACCGGCAAGAAGGACATGC
ACACAATCTACTGGAATGCCGCCTTCAGCCCCGAGAACCTGCAGGACGTGGTGGTGA
AGCTGAACGGCGAGGCCGAGCTGTTTTATAGGGACAAGTCCGATATCAAGGAGATC
GTGCACCGCGAGGGCGAGATCCTGGTGAATAGGACCTACAACGGCCGCACACCAGT
GCCCGACAAGATCCACAAGAAGCTGACCGATTATCACAATGGCCGGACAAAGGACC
TGGGCGAGGCCAAGGAGTACCTGGATAAGGTGAGATACTTCAAGGCCCACTATGAC
ATCACCAAGGATCGGAGATACCTGAACGACAAGATCTATTTCCACGTGCCTCTGACC
CTGAACTTCAAGGCCAACGGCAAGAAGAATCTGAACAAGATGGTCATCGAGAAGTT
CCTGTCCGATGAGAAGGCCCACATCATCGGCATCGACAGGGGCGAGCGCAATCTGCT
GTACTATTCCATCATCGACAGGTCTGGCAAGATCATCGATCAGCAGAGCCTGAATGT
GATCGACGGCTTTGATTATCGGGAGAAGCTGAACCAGAGAGAGATCGAGATGAAGG
ATGCCCGCCAGTCTTGGAACGCCATCGGCAAGATCAAGGACCTGAAGGAGGGCTAC
CTGAGCAAGGCCGTGCACGAGATCACCAAGATGGCCATCCAGTATAATGCCATCGTG
GTCATGGAGGAGCTGAACTACGGCTTCAAGCGGGGCCGGTTCAAGGTGGAGAAGCA
GATCTATCAGAAGTTCGAGAATATGCTGATCGATAAGATGAACTACCTGGTGTTTAA
GGACGCACCTGATGAGTCCCCAGGAGGCGTGCTGAATGCCTACCAGCTGACAAACCC
ACTGGAGTCTTTCGCCAAGCTGGGCAAGCAGACCGGCATCCTGTTTTACGTGCCAGC
CGCCTATACATCCAAGATCGACCCCACCACAGGCTTCGTGAATCTGTTTAACACCTCC
TCTAAGACAAACGCCCAGGAGCGGAAGGAGTTCCTGCAGAAGTTTGAGAGCATCTC
CTATTCTGCCAAGGATGGCGGCATCTTTGCCTTCGCCTTTGACTACAGAAAGTTCGGC
ACCAGCAAGACAGATCACAAGAACGTGTGGACCGCCTATACAAACGGCGAGAGGAT
GCGCTACATCAAGGAGAAGAAGCGGAATGAGCTGTTTGACCCTTCTAAGGAGATCA
AGGAGGCCCTGACCAGCTCCGGCATCAAGTACGATGGCGGCCAGAACATCCTGCCA
GACATCCTGAGGAGCAACAATAACGGCCTGATCTACACAATGTATTCTAGCTTCATC
GCCGCCATCCAGATGCGCGTGTACGACGGCAAGGAGGATTATATCATCAGCCCCATC
AAGAACTCCAAGGGCGAGTTCTTTAGGACCGACCCCAAGAGGCGCGAGCTGCCTATC
GACGCCGATGCCAATGGCGCCTACAACATCGCCCTGAGGGGAGAGCTGACAATGAG
GGCAATCGCAGAGAAGTTCGACCCTGATAGCGAGAAGATGGCCAAGCTGGAGCTGA
AGCACAAGGATTGGTTCGAGTTTATGCAGACCAGAGGCGACAAAAGGCCGGCGGCCA
CGAAAAAGGCCGGCCAGGCAAAAAAGAAAAAGGGATCCTACCCATACGATGTTCCAG
ATTACGCTTATCCCTACGACGTGCCTGATTATGCATACCCATATGATGTCCCCG
ACTATGCCTAAGAATTC

[chemical structure]

(SEQ ID NO: 223)
ATGAACGGCAATAGGTCCATCGTGTACCGCGAGTTCGTGGGCGTGATCCC
CGTGGCCAAGACCCTGAGGAATGAGCTGCGCCCTGTGGGCCACACACAGGAGCACA
TCATCCAGAACGGCCTGATCCAGGAGGACGAGCTGCGGCAGGAGAAGAGCACCGAG
CTGAAGAACATCATGGACGATTACTATAGAGAGTACATCGATAAGTCTCTGAGCGGC
GTGACCGACCTGGACTTCACCCTGCTGTTCGAGCTGATGAACCTGGTGCAGAGCTCC
CCCTCCAAGGACAATAAGAAGGCCCTGGAGAAGGAGCAGTCTAAGATGAGGGAGCA
GATCTGCACCCACCTGCAGTCCGACTCTAACTACAAGAATATCTTTAACGCCAAGCT
GCTGAAGGAGATCCTGCCTGATTTCATCAAGAACTACAATCAGTATGACGTGAAGGA
TAAGGCCGGCAAGCTGGAGACACTGGCCCTGTTTAATGGCTTCAGCACATACTTTAC
CGACTTCTTTGAGAAGAGGAAGAACGTGTTCACCAAGGAGGCCGTGAGCACATCCAT
CGCCTACCGCATCGTGCACGAGAACTCCCTGATCTTCCTGGCCAATATGACCTCTTAT
AAGAAGATCAGCGAGAAGGCCCTGGATGAGATCGAAGTGATCGAGAAGAACAATCA
GGACAAGATGGGCGATTGGGAGCTGAATCAGATCTTTAACCCTGACTTCTACAATAT
GGTGCTGATCCAGTCCGGCATCGACTTCTACAACGAGATCTGCGGCGTGGTGAATGC
CCACATGAACCTGTACTGTCAGCAGACCAAGAACAATTATAACCTGTTCAAGATGCG
GAAGCTGCACAAGCAGATCCTGGCCTACACCAGCACCAGCTTCGAGGTGCCCAAGAT
GTTCGAGGACGATATGAGCGTGTATAACGCCGTGAACGCCTTCATCGACGAGACAGA
GAAGGGCAACATCATCGGCAAGCTGAAGGATATCGTGAATAAGTACGACGAGCTGG
ATGAGAAGAGAATCTATATCAGCAAGGACTTTTACGAGACACTGAGCTGCTTCATGT
CCGGCAACTGGAATCTGATCACAGGCTGCGTGGAGAACTTCTACGATGAGAACATCC
ACGCCAAGGGCAAGTCCAAGGAGGAGAAGGTGAAGAAGGCCGTGAAGGAGGACAA
GTACAAGTCTATCAATGACGTGAACGATCTGGTGGAGAAGTATATCGATGAGAAGG
AGAGGAATGAGTTCAAGAACAGCAATGCCAAGCAGTACATCCGCGAGATCTCCAAC
ATCATCACCGACACAGAGACAGCCCACCTGGAGTATGACGATCACATCTCTCTGATC
GAGAGCGAGGAGAAGGCCGACGAGATGAAGAAGCGGCTGGATATGTATATGAACAT
GTACCACTGGGCCAAGGCCTTTATCGTGGACGAGGTGCTGGACAGAGATGAGATGTT
CTACAGCGATATCGACGATATCTATAATATCCTGGAGAACATCGTGCCACTGTATAA
TCGGGTGAGAAACTACGTGACCCAGAAGCCCTACAACTCTAAGAAGATCAAGCTGA
ATTTCCAGAGCCCTACACTGGCCAATGGCTGGTCCCAGTCTAAGGAGTTCGACAACA
ATGCCATCATCCTGATCAGAGATAACAAGTACTATCTGGCCATCTTCAATGCCAAGA
ACAAGCCAGACAAGAAGATCATCCAGGGCAACTCCGATAAGAAGAACGACAACGAT
TACAAGAAGATGGTGTATAACCTGCTGCCAGGCGCCAACAAGATGCTGCCCAAGGT
GTTTCTGTCTAAGAAGGGCATCGAGACATTCAAGCCCTCCGACTATATCATCTCTGGC
TACAACGCCCACAAGCACATCAAGACAAGCGAGAATTTTGATATCTCCTTCTGTCGG
GACCTGATCGATTACTTCAAGAACAGCATCGAGAAGCACGCCGAGTGGAGAAAGTA
TGAGTTCAAGTTTTCCGCCACCGACAGCTACTCCGATATCTCTGAGTTCTATCGGGAG
GTGGAGATGCAGGGCTACAGAATCGACTGGACATATATCAGCGAGGCCGACATCAA
CAAGCTGGATGAGGAGGGCAAGATCTATCTGTTTCAGATCTACAATAAGGATTTCGC
CGAGAACAGCACCGGCAAGGAGAATCTGCACACAATGTACTTTAAGAACATCTTCTC
CGAGGAGAATCTGAAGGACATCATCATCAAGCTGAACGGCCAGGCCGAGCTGTTTTA
TCGGAGAGCCTCTGTGAAGAATCCCGTGAAGCACAAGAAGGATAGCGTGCTGGTGA
ACAAGACCTACAAGAATCAGCTGGACAACGGCGACGTGGTGAGAATCCCCATCCCT
GACGATATCTATAACGAGATCTACAAGATGTATAATGGCTACATCAAGGAGTCCGAC
CTGTCTGAGGCCGCCAAGGAGTACCTGGATAAGGTGGAGGTGAGGACCGCCCAGAA
GGACATCGTGAAGGATTACCGCTATACAGTGGACAAGTACTTCATCCACACACCTAT
CACCATCAACTATAAGGTGACCGCCCGCAACAATGTGAATGATATGGTGGTGAAGTA
CATCGCCCAGAACGACGATATCCACGTGATCGGCATCGACCGGGGCGAGAGAAACC
TGATCTACATCTCCGTGATCGATTCTCACGGCAACATCGTGAAGCAGAAATCCTACA
ACATCCTGAACAACTACGACTACAAGAAGAAGCTGGTGGAGAAGGAGAAAACCCGG
GAGTACGCCAGAAAGAACTGGAAGAGCATCGGCAATATCAAGGAGCTGAAGGAGG
GCTATATCTCCGGCGTGGTGCACGAGATCGCCATGCTGATCGTGGAGTACAACGCCA
TCATCGCCATGGAGGACCTGAATTATGGCTTTAAGAGGGGCCGCTTCAAGGTGGAGC
GGCAGGTGTACCAGAAGTTTGAGAGCATGCTGATCAATAAGCTGAACTATTTCGCCA
GCAAGGAGAAGTCCGTGGACGAGCCAGGAGGCCTGCTGAAGGGCTATCAGCTGACC
TACGTGCCCGATAATATCAAGAACCTGGGCAAGCAGTGCGGCGTGATCTTTTACGTG
CCTGCCGCCTTCACCAGCAAGATCGACCCATCCACAGGCTTTATCTCTGCCTTCAACT
TTAAGTCTATCAGCACAAATGCCTCTCGGAAGCAGTTCTTTATGCAGTTTGACGAGAT
CAGATACTGTGCCGAGAAGGATATGTTCAGCTTTGGCTTCGACTACAACAACTTCGA
TACCTACAACATCACAATGGGCAAGACACAGTGGACCGTGTATACAAACGGCGAGA
GACTGCAGTCTGAGTTCAACAATGCCAGGCGCACCGGCAAGACAAAGAGCATCAAT
CTGACAGAGACAATCAAGCTGCTGCTGGAGGACAATGAGATCAACTACGCCGACGG
CCACGATATCAGGATCGATATGGAGAAGATGGACGAGGATAAGAAGAGCGAGTTCT
TTGCCCAGCTGCTGAGCCTGTATAAGCTGACCGTGCAGATGCGCAATTCCTATACAG
AGGCCGAGGAGCAGGAGAACGGCATCTCTTACGACAAGATCATCAGCCCTGTGATC
AATGATGAGGGCGAGTTCTTTGACTCCGATAACTATAAGGAGTCTGACGATAAGGAG
TGCAAGATGCCAAAGGACGCCGATGCCAACGGCGCCTACTGTATCGCCCTGAAGGG
CCTGTATGAGGTGCTGAAGATCAAGAGCGAGTGGACCGAGGACGGCTTTGATAGGA
ATTGCCTGAAGCTGCCACACGCAGAGTGGCTGGACTTCATCCAGAACAAGCGGTACG
AGAAAAGGCCGGCGGCCACGAAAAAGGCCGGCCAGGCAAAAAAGAAAAAGGGATCCTA
CCCATACGATGTTCCAGATTACGCTTATCCCTACGACGTGCCTGATTATGCATA
CCCATATGATGTCCCCGACTATGCCTAAGAATTC

[chemical structure]

(SEQ ID NO: 224)
ATGCTGTTCCAGGACTTTACCCACCTGTATCCACTGTCCAAGACAGTGAG
ATTTGAGCTGAAGCCCATCGATAGGACCCTGGAGCACATCCACGCCAAGAACTTCCT
GTCTCAGGACGAGACAATGGCCGATATGCACCAGAAGGTGAAAGTGATCCTGGACG
ATTACCACCGCGACTTCATCGCCGATATGATGGGCGAGGTGAAGCTGACCAAGCTGG
CCGAGTTCTATGACGTGTACCTGAAGTTTCGGAAGAACCCAAAGGACGATGAGCTGC
AGAAGCAGCTGAAGGATCTGCAGGCCGTGCTGAGAAAGGAGATCGTGAAGCCCATC
GGCAATGGCGGCAAGTATAAGGCCGGCTACGACAGGCTGTTCGGTCGCCAAGCTGTTT
AAGGACGGCAAGGAGCTGGGCGATCTGGCCAAGTTCGTGATCGCACAGGAGGGAGA
GAGCTCCCCAAAGCTGGCCCACCTGGCCCACTTCGAGAAGTTTTCCACCTATTTCACA
GGCTTTCACGATAACCGGAAGAATATGTATTCTGACGAGGATAAGCACACCGCCATC
GCCTACCGCCTGATCCACGAGAACCTGCCCCGGTTTATCGACAATCTGCAGATCCTG
ACCACAATCAAGCAGAAGCACTCTGCCCTGTACGATCAGATCATCAACGAGCTGACC
GCCAGCGGCCTGGACGTGTCTCTGGCCAGCCACCTGGATGGCTATCACAAGCTGCTG
ACACAGGAGGGCATCACCGCCTACAATACACTGCTGGGAGGAATCTCCGGAGAGGC
AGGCTCTCCTAAGATCCAGGGCATCAACGAGCTGATCAATTCTCACCACAACCAGCA
CTGCCACAAGAGCGAGAGAATCGCCAAGCTGAGGCCACTGCACAAGCAGATCCTGT
CCGACGGCATGAGCGTGTCCTTCCTGCCCTCTAAGTTTGCCGACGATAGCGAGATGT
GCCAGGCCGTGAACGAGTTCTATCGCCACTACGCCGACGTGTTCGCCAAGGTGCAGA
GCCTGTTCGACGGCTTTGACGATCACCAGAAGGATGGCATCTACGTGGAGCACAAGA
ACCTGAATGAGCTGTCCAAGCAGGCCTTCGGCGACTTTGCACTGCTGGGACGCGTGC
TGGACGGATACTATGTGGATGTGGTGAATCCAGAGTTCAACGAGCGGTTTGCCAAGG
CCAAGACCGACAATGCCAAGGCCAAGCTGACAAAGGAGAAGGATAAGTTCATCAAG
GGCGTGCACTCCCTGGCCTCTCTGGAGCAGGCCATCGAGCACTATACCGCAAGGCAC
GACGATGAGAGCGTGCAGGCAGGCAAGCTGGGACAGTACTTCAAGCACGGCCTGGC
CGGAGTGGACAACCCCATCCAGAAGATCCACAACAATCACAGCACCATCAAGGGCT
TTCTGGAGAGGGAGCGCCCTGCAGGAGAGAGAGCCCTGCCAAAGATCAAGTCCGGC
AAGAATCCTGAGATGACACAGCTGAGGCAGCTGAAGGAGCTGCTGGATAACGCCCT
GAATGTGGCCCACTTCGCCAAGCTGCTGACCACAAAGACCACACTGGACAATCAGG
ATGGCAACTTCTATGGCGAGTTTGGCGTGCTGTACGACGAGCTGGCCAAGATCCCCA
CCCTGTATAACAAGGTGAGAGATTACCTGAGCCAGAAGCCTTTCTCCACCGAGAAGT
ACAAGCTGAACTTTGGCAATCCAACACTGCTGAATGGCTGGGACCTGAACAAGGAG
AAGGATAATTTCGGCGTGATCCTGCAGAAGGACGGCTGCTACTATCTGGCCCTGCTG
GACAAGGCCCACAAGAAGGTGTTTGATAACGCCCCTAATACAGGCAAGAGCATCTA
TCAGAAGATGATCTATAAGTACCTGGAGGTGAGGAAGCAGTTCCCCAAGGTGTTCTT
TTCCAAGGAGGCCATCGCCATCAACTACCACCCTTCTAAGGAGCTGGTGGAGATCAA
GGACAAGGGCCGGCAGAGATCCGACGATGAGCGCCTGAAGCTGTATCGGTTTATCCT
GGAGTGTCTGAAGATCCACCCTAAGTACGATAAGAAGTTCGAGGGCGCCATCGGCG
ACATCCAGCTGTTTAAGAAGGATAAGAAGGGCAGAGAGGTGCCAATCAGCGAGAAG
GACCTGTTCGATAAGATCAACGGCATCTTTTCTAGCAAGCCTAAGCTGGAGATGGAG
GACTTCTTTATCGGCGAGTTCAAGAGGTATAACCCAAGCCAGGACCTGGTGGATCAG
TATAATATCTACAAGAAGATCGACTCCAACGATAATCGCAAGAAGGAGAATTTCTAC
AACAATCACCCCAAGTTTAAGAAGGATCTGGTGCGGTACTATTACGAGTCTATGTGC
AAGCACGAGGAGTGGGAGGAGAGCTTCGAGTTTTCCAAGAAGCTGCAGGACATCGG
CTGTTACGTGGATGTGAACGAGCTGTTTACCGAGATCGAGACACGGAGACTGAATTA
TAAGATCTCCTTCTGCAACATCAATGCCGACTACATCGATGAGCTGGTGGAGCAGGG
CCAGCTGTATCTGTTCCAGATCTACAACAAGGACTTTTCCCCAAAGGCCCACGGCAA
GCCCAATCTGCACACCCTGTACTTCAAGGCCCTGTTTTCTGAGGACAACCTGGCCGAT
CCTATCTATAAGCTGAATGGCGAGGCCCAGATCTTCTACAGAAAGGCCTCCCTGGAC
ATGAACGAGACAACAATCCACAGGGCCGGCGAGGTGCTGGAGAACAAGAATCCCGA
TAATCCTAAGAAGAGACAGTTCGTGTACGACATCATCAAGGATAAGAGGTACACAC
AGGACAAGTTCATGCTGCACGTGCCAATCACCATGAACTTTGGCGTGCAGGGCATGA
CAATCAAGGAGTTCAATAAGAAGGTGAACCAGTCTATCCAGCAGTATGACGAGGTG
AACGTGATCGGCATCGATCGGGGCGAGAGACACCTGCTGTACCTGACCGTGATCAAT
AGCAAGGGCGAGATCCTGGAGCAGTGTTCCCTGAACGACATCACCACAGCCTCTGCC
AATGGCACACAGATGACCACACCTTACCACAAGATCCTGGATAAGAGGGAGATCGA
GCGCCTGAACGCCCGGGTGGGATGGGGCGAGATCGAGACAATCAAGGAGCTGAAGT
CTGGCTATCTGAGCCACGTGGTGCACCAGATCAGCCAGCTGATGCTGAAGTACAACG
CCATCGTGGTGCTGGAGGACCTGAATTTTCGGCTTTAAGAGGGGCCGCTTTAAGGTGG
AGAAGCAGATCTATCAGAACTTCGAGAATGCCCTGATCAAGAAGCTGAACCACCTG
GTGCTGAAGGACAAGGCCGACGATGAGATCGGCTCTTACAAGAATGCCCTGCAGCT
GACCAACAATTTCACAGATCTGAAGAGCATCGGCAAGCAGACCGGCTTCCTGTTTTA
TGTGCCCGCCTGGAACACCTCTAAGATCGACCCTGAGACAGGCTTTGTGGATCTGCT
GAAGCCAAGATACGAGAACATCGCCCAGAGCCAGGCCTTCTTTGGCAAGTTCGACA
AGATCTGCTATAATGCCGACAAGGATTACTTCGAGTTTCACATCGACTACGCCAAGT
TTACCGATAAGGCCAAGAATAGCCGCCAGATCTGGACAATCTGTTCCCACGGCGACA
AGCGGTACGTGTACGATAAGACAGCCAACCAGAATAAGGGCGCCGCCAAGGGCATC
AACGTGAATGATGAGCTGAAGTCCCTGTTCGCCCGCCACCACATCAACGAGAAGCAG
CCCAACCTGGTCATGGACATCTGCCAGAACAATGATAAGGAGTTTCACAAGTCTCTG
ATGTACCTGCTGAAAACCCTGCTGGCCCTGCGGTACAGCAACGCCTCCTCTGACGAG
GATTTCATCCTGTCCCCCGTGGCAAACGACGAGGGCGTGTTCTTTAATAGCGCCCTG
GCCGACGATACACAGCCTCAGAATGCCGATGCCAACGGCGCCTACCACATCGCCCTG
AAGGGCCTGTGGCTGCTGAATGAGCTGAAGAACTCCGACGATCTGAACAAGGTGAA
GCTGGCCATCGACAATCAGACCTGGCTGAATTTCGCCCAGAACAGGAAAAGGCCGGC
GGCCACGAAAAAGGCCGGCCAGGCAAAAAAGAAAAAGGGATCCTACCATACGATGTT
CCAGATTACGCTTATCCCTACGACGTGCCTGATTATGCATACCCATATGATGTC
CCCGACTATGCCTAAGAATTC

[chemical structure]

(SEQ ID NO: 225)
ATGGAGGACTATTCCGGCTTTGTGAACATCTACTCTATCCAGAAAACCCT
GAGGTTCGAGCTGAAGCCAGTGGGCAAGACACTGGAGCACATCGAGAAGAAGGGCT
TCCTGAAGAAGGACAAGATCCGGGCCGAGGATTACAAGGCCGTGAAGAAGATCATC
GATAAGTACCACAGAGCCTATATCGAGGAGGTGTTTGATTCCGTGCTGCACCAGAAG
AAGAAGAAGGACAAGACCCGCTTTTCTACACAGTTCATCAAGGAGATCAAGGAGTT
CAGCGAGCTGTACTATAAGACCGAGAAGAACATCCCCGACAAGGAGAGGCTGGAGG
CCCTGAGCGAGAAGCTGCGCAAGATGCTGGTGGGCGCCTTTAAGGGCGAGTTCTCCG
AGGAGGTGGCCGAGAAGTATAAGAACCTGTTTTCTAAGGAGCTGATCAGGAATGAG
ATCGAGAAGTTCTGCGAGACAGACGAGGAGCGCAAGCAGGTGTCTAACTTCAAGAG
CTTCACCACATACTTTACCGGCTTCCACTCCAACAGGCAGAATATCTATTCCGACGAG
AAGAAGTCTACAGCCATCGGCTACCGCATCATCCACCAGAACCTGCCTAAGTTCCTG
GATAATCTGAAGATCATCGAGTCCATCCAGCGGCGGTTCAAGGACTTCCCATGGTCT
GATCTGAAGAAGAACCTGAAGAAGATCGATAAGAATATCAAGCTGACCGAGTACTT
CAGCATCGACGGCTTCGTGAACGTGCTGAATCAGAAGGGCATCGATGCCTACAACAC
AATCCTGGGCGGCAAGTCCGAGGAGTCTGGCGAGAAGATCCAGGGCCTGAACGAGT
ACATCAATCTGTATCGGCAGAAGAACAATATCGACAGAAAGAACCTGCCCAATGTG
AAGATCCTGTTTAAGCAGATCCTGGGCGATAGGGAGACAAAGAGCTTTATCCCTGAG
GCCTTCCCAGACGATCAGTCCGTGCTGAACTCTATCACAGAGTTCGCCAAGTACCTG
AAGCTGGATAAGAAGAAGAAGAGCATCATCGCCGAGCTGAAGAAGTTTCTGAGCTC
CTTCAATCGCTACGAGCTGGACGGCATCTATCTGGCCAACGATAATAGCCTGGCCTC
TATCAGCACCTTCCTGTTTGACGATTGGTCCTTTATCAAGAAGTCCGTGTCTTTCAAG
TATGACGAGTCCGTGGGCGACCCCAAGAAGAAGATCAAGTCTCCCCTGAAGTACGA
GAAGGAGAAGGAGAAGTGGCTGAAGCAGAAGTACTATACAATCTCTTTCCTGAACG
ATGCCATCGAGAGCTATTCCAAGTCTCAGGACGAGAAGAGGGTGAAGATCCGCCTG
GAGGCCTACTTTGCCGAGTTCAAGAGCAAGGACGATGCCAAGAAGCAGTTCGACCT
GCTGGAGAGGATCGAGGAGGCCTATGCCATCGTGGAGCCTCTGCTGGGAGCAGAGT
ACCCAAGGGACCGCAACCTGAAGGCCGATAAGAAGGAAGTGGGCAAGATCAAGGA
CTTCCTGGATAGCATCAAGTCCCTGCAGTTCTTTCTGAAGCCTCTGCTGTCCGCCGAG
ATCTTTGACGAGAAGGATCTGGGCTTCTACAATCAGCTGGAGGGCTACTATGAGGAG
ATCGATTCTATCGGCCACCTGTATAACAAGGTGCGGAATTATCTGACCGGCAAGATC
TACAGCAAGGAGAAGTTTAAGCTGAACTTCGAGAACAGCACCCTGCTGAAGGGCTG
GGACGAGAACCGGGAGGTGGCCAATCTGTGCGTGATCTTCAGAGAGGACCAGAAGT
ACTATCTGGGCGTGATGGATAAGGAGAACAATACCATCCTGTCCGACATCCCCAAGG
TGAAGCCTAACGAGCTGTTTTACGAGAAGATGGTGTATAAGCTGATCCCCACACCTC
ACATGCAGCTGCCCCGGATCATCTTCTCTAGCGACAACCTGTCTATCTATAATCCTAG
CAAGTCCATCCTGAAGATCAGAGAGGCCAAGAGCTTTAAGGAGGGCAAGAACTTCA
AGCTGAAGGACTGTCACAAGTTTATCGATTTCTACAAGGAGTCTATCAGCAAGAATG
AGGACTGGAGCAGATTCGACTTCAAGTTCAGCAAGACCAGCAGCTACGAGAACATC
AGCGAGTTTTACCGGGAGGTGGAGAGACAGGGCTATAACCTGGACTTCAAGAAGGT
GTCTAAGTTCTACATCGACAGCCTGGTGGAGGATGGCAAGCTGTACCTGTTCCAGAT
CTATAACAAGGACTTTTCTATCTTCAGCAAGGGCAAGCCCAATCTGCACACCATCTA
TTTTCGGTCCCTGTTCTCTAAGGAGAACCTGAAGGACGTGTGCCTGAAGCTGAATGG
CGAGGCCGAGATGTTCTTTCGGAAGAAGTCCATCAACTACGATGAGAAGAAGAAGC
GGGAGGGCCACCACCCCGAGCTGTTTGAGAAGCTGAAGTATCCTATCCTGAAGGACA
AGAGATACAGCGAGGATAAGTTTCAGTTCCACCTGCCCATCAGCCTGAACTTCAAGT
CCAAGGAGCGGCTGAACTTTAATCTGAAAGTGAATGAGTTCCTGAAGAGAAACAAG
GACATCAATATCATCGGCATCGATCGGGGCGAGAGAAACCTGCTGTACCTGGTCATG
ATCAATCAGAAGGGCGAGATCCTGAAGCAGACCCTGCTGGACAGCATGCAGTCCGG
CAAGGGCCGGCCTGAGATCAACTACAAGGAGAAGCTGCAGGAGAAGGAGATCGAG
AGGGATAAGGCCCGCAAGAGCTGGGGCACAGTGGAGAATATCAAGGAGCTGAAGG
AGGGCTATCTGTCTATCGTGATCCACCAGATCAGCAAGCTGATGGTGGAGAACAATG
CCATCGTGGTGCTGGAGGACCTGAACATCGGCTTTAAGCGGGGCAGACAGAAGGTG
GAGCGGCAGGTGTACCAGAAGTTCGAGAAGATGCTGATCGATAAGCTGAACTTTCTG
GTGTTCAAGGAGAATAAGCCAACCGAGCCAGGAGGCGTGCTGAAGGCCTATCAGCT
GACAGACGAGTTTCAGTCTTTCGAGAAGCTGAGCAAGCAGACCGGCTTTCTGTTCTA
CGTGCCAAGCTGGAACACCTCCAAGATCGACCCCAGAACAGGCTTTATCGATTTCCT
GCACCCTGCCTACGAGAATATCGAGAAGGCCAAGCAGTGGATCAACAAGTTTGATTC
CATCAGGTTCAATTCTAAGATGGACTGGTTTGAGTTCACCGCCGATACACGCAAGTT
TTCCGAGAACCTGATGCTGGGCAAGAATCGGGTGTGGGTCATCTGCACCACAAATGT
GGAGCGGTACTTCACCAGCAAGACCGCCAACAGCTCCATCCAGTACAATAGCATCCA
GATCACCGAGAAGCTGAAGGAGCTGTTTGTGGACATCCCTTTCAGCAACGGCCAGGA
TCTGAAGCCAGAGATCCTGAGGAAGAATGACGCCGTGTTCTTTAAGAGCCTGCTGTT
TTACATCAAGACCACACTGTCCCTGCGCCAGAACAATGGCAAGAAGGGCGAGGAGG
AGAAGGACTTCATCCTGAGCCCAGTGGTGGATTCCAAGGGCCGGTTCTTTAACTCTC
TGGAGGCCAGCGACGATGAGCCCAAGGACGCCGATGCCAATGGCGCCTACCACATC
GCCCTGAAGGGCCTGATGAACCTGCTGGTGCTGAATGAGACAAAGGAGGAGAACCT
GAGCAGACCAAAGTGGAAGATCAAGAATAAGGACTGGCTGGAGTTCGTGTGGGAGA
GGAACCGCAAAAGGCCGGCGGCCACGAAAAAGGCCGGCCAGGCAAAAAAGAAAAAGGG
ATCCTACCCATACGATGTTCCAGATTACGCTTATCCCTACGACGTGCCTGATTAT
GCATACCCATATGATGTCCCCGACTATGCCTAAGAATTC
14-Lachnospiraceae bacterium ND2006 (LbCpf1)
(SEQ ID NO: 226)
ATGAGCAAGCTGGAGAAGTTTACAAACTGCTACTCCCTGTCTAAGACCCT
GAGGTTCAAGGCCATCCCTGTGGGCAAGACCCAGGAGAACATCGACAATAAGCGGC
TGCTGGTGGAGGACGAGAAGAGAGCCGAGGATTATAAGGGCGTGAAGAAGCTGCTG
GATCGCTACTATCTGTCTTTTATCAACGACGTGCTGCACAGCATCAAGCTGAAGAAT
CTGAACAATTACATCAGCCTGTTCCGGAAGAAAACCAGAACCGAGAAGGAGAATAA
GGAGCTGGAGAACCTGGAGATCAATCTGCGGAAGGAGATCGCCAAGGCCTTCAAGG
GCAACGAGGGCTACAAGTCCCTGTTTAAGAAGGATATCATCGAGACAATCCTGCCAG
AGTTCCTGGACGATAAGGACGAGATCGCCCTGGTGAACAGCTTCAATGGCTTTACCA
CAGCCTTCACCGGCTTCTTTGATAACAGAGAGAATATGTTTTCCGAGGAGGCCAAGA
GCACATCCATCGCCTTCAGGTGTATCAACGAGAATCTGACCCGCTACATCTCTAATAT
GGACATCTTCGAGAAGGTGGACGCCATCTTTGATAAGCACGAGGTGCAGGAGATCA
AGGAGAAGATCCTGAACAGCGACTATGATGTGGAGGATTTCTTTGAGGGCGAGTTCT
TTAACTTTGTGCTGACACAGGAGGGCATCGACGTGTATAACGCCATCATCGGCGGCT
TCGTGACCGAGAGCGGCGAGAAGATCAAGGGCCTGAACGAGTACATCAACCTGTAT
AATCAGAAAACCAAGCAGAAGCTGCCTAAGTTTAAGCCACTGTATAAGCAGGTGCT
GAGCGATCGGGAGTCTCTGAGCTTCTACGGCGAGGGCTATACATCCGATGAGGAGGT
GCTGGAGGTGTTTAGAAACACCCTGAACAAGAACAGCGAGATCTTCAGCTCCATCAA
GAAGCTGGAGAAGCTGTTCAAGAATTTTGACGAGTACTCTAGCGCCGGCATCTTTGT
GAAGAACGGCCCCGCCATCAGCACAATCTCCAAGGATATCTTCGGCGAGTGGAACGT
GATCCGGGACAAGTGGAATGCCGAGTATGACGATATCCACCTGAAGAAGAAGGCCG
TGGTGACCGAGAAGTACGAGGACGATCGGAGAAAGTCCTTCAAGAAGATCGGCTCC
TTTTCTCTGGAGCAGCTGCAGGAGTACGCCGACGCCGATCTGTCTGTGGTGGAGAAG
CTGAAGGAGATCATCATCCAGAAGGTGGATGAGATCTACAAGGTGTATGGCTCCTCT
GAGAAGCTGTTCGACGCCGATTTTGTGCTGGAGAAGAGCCTGAAGAAGAACGACGC
CGTGGTGGCCATCATGAAGGACCTGCTGGATTCTGTGAAGAGCTTCGAGAATTACAT
CAAGGCCTTCTTTGGCGAGGGCAAGGAGACAAACAGGGACGAGTCCTTCTATGGCG
ATTTTGTGCTGGCCTACGACATCCTGCTGAAGGTGGACCACATCTACGATGCCATCC
GCAATTATGTGACCCAGAAGCCCTACTCTAAGGATAAGTTCAAGCTGTATTTTCAGA
ACCCTCAGTTCATGGGCGGCTGGGACAAGGATAAGGAGACAGACTATCGGGCCACC
ATCCTGAGATACGGCTCCAAGTACTATCTGGCCATCATGGATAAGAAGTACGCCAAG
TGCCTGCAGAAGATCGACAAGGACGATGTGAACGGCAATTACGAGAAGATCAACTA
TAAGCTGCTGCCCGGCCCTAATAAGATGCTGCCAAAGGTGTTCTTTTCTAAGAAGTG
GATGGCCTACTATAACCCCAGCGAGGACATCCAGAAGATCTACAAGAATGGCACATT
CAAGAAGGGCGATATGTTTAACCTGAATGACTGTCACAAGCTGATCGACTTCTTTAA
GGATAGCATCTCCCGGTATCCAAAGTGGTCCAATGCCTACGATTTCAACTTTTCTGAG
ACAGAGAAGTATAAGGACATCGCCGGCTTTTACAGAGAGGTGGAGGAGCAGGGCTA
TAAGGTGAGCTTCGAGTCTGCCAGCAAGAAGGAGGTGGATAAGCTGGTGGAGGAGG
GCAAGCTGTATATGTTCCAGATCTATAACAAGGACTTTTCCGATAAGTCTCACGGCA
CACCCAATCTGCACACCATGTACTTCAAGCTGCTGTTTGACGAGAACAATCACGGAC
AGATCAGGCTGAGCGGAGGAGCAGAGCTGTTCATGAGGCGCGCCTCCCTGAAGAAG
GAGGAGCTGGTGGTGCACCCAGCCAACTCCCCTATCGCCAACAAGAATCCAGATAAT
CCCAAGAAAACCACAACCCTGTCCTACGACGTGTATAAGGATAAGAGGTTTTCTGAG
GACCAGTACGAGCTGCACATCCCAATCGCCATCAATAAGTGCCCCAAGAACATCTTC
AAGATCAATACAGAGGTGCGCGTGCTGCTGAAGCACGACGATAACCCCTATGTGATC
GGCATCGATAGGGGCGAGCGCAATCTGCTGTATATCGTGGTGGTGGACGGCAAGGG
CAACATCGTGGAGCAGTATTCCCTGAACGAGATCATCAACAACTTCAACGGCATCAG
GATCAAGACAGATTACCACTCTCTGCTGGACAAGAAGGAGAAGGAGAGGTTCGAGG
CCCGCCAGAACTGGACCTCCATCGAGAATATCAAGGAGCTGAAGGCCGGCTATATCT
CTCAGGTGGTGCACAAGATCTGCGAGCTGGTGGAGAAGTACGATGCCGTGATCGCCC
TGGAGGACCTGAACTCTGGCTTTAAGAATAGCCGCGTGAAGGTGGAGAAGCAGGTG
TATCAGAAGTTCGAGAAGATGCTGATCGATAAGCTGAACTACATGGTGGACAAGAA
GTCTAATCCTTGTGCAACAGGCGGCGCCCTGAAGGGCTATCAGATCACCAATAAGTT
CGAGAGCTTTAAGTCCATGTCTACCCAGAACGGCTTCATCTTTTACATCCCTGCCTGG
CTGACATCCAAGATCGATCCATCTACCGGCTTTGTGAACCTGCTGAAAACCAAGTAT
ACCAGCATCGCCGATCCAAGAAGTTCATCAGCTCCTTTGACAGGATCATGTACGTG
CCCGAGGAGGATCTGTTCGAGTTTGCCCTGGACTATAAGAACTTCTCTCGCACAGAC
GCCGATTACATCAAGAAGTGGAAGCTGTACTCCTACGGCAACCGGATCAGAATCTTC
CGGAATCCTAAGAAGAACAACGTGTTCGACTGGGAGGAGGTGTGCCTGACCAGCGC
CTATAAGGAGCTGTTCAACAAGTACGGCATCAATTATCAGCAGGGCGATATCAGAGC
CCTGCTGTGCGAGCAGTCCGACAAGGCCTTCTACTCTAGCTTTATGGCCCTGATGAGC
CTGATGCTGCAGATGCGGAACAGCATCACAGGCCGCACCGACGTGGATTTTCTGATC
AGCCCTGTGAAGAACTCCGACGGCATCTTCTACGATAGCCGGAACTATGAGGCCCAG
GAGAATGCCATCCTGCCAAAGAACGCCGACGCCAATGGCGCCTATAACATCGCCAG
AAAGGTGCTGTGGGCCATCGGCCAGTTCAAGAAGGCCGAGGACGAGAAGCTGGATA
AGGTGAAGATCGCCATCTCTAACAAGGAGTGGCTGGAGTACGCCCAGACCAGCGTG
AAGCACAAAAGGCCGGCGGCCACGAAAAAGGCCGGCCAGGCAAAAAAGAAAAAGGGAT
CCTACCCATACGATGTTCCAGATTACGCTTATCCCTACGACGTGCCTGATTATGC
ATACCCATATGATGTCCCCGACTATGCCTAAGAATTC

[chemical structure]

(SEQ ID NO: 227)
ATGGACAGCCTGAAGGATTTCACCAACCTGTACCCCGTGTCCAAGACACT
GCGGTTTGAGCTGAAGCCTGTGGGCAAGACCCTGGAGAATATCGAGAAGGCCGGCA
TCCTGAAGGAGGATGAGCACAGAGCCGAGAGCTACCGGAGAGTGAAGAAGATCATC
GATACATATCACAAGGTGTTCATCGACAGCTCCCTGGAGAACATGGCCAAGATGGGC
ATCGAGAATGAGATCAAGGCCATGCTGCAGTCCTTTTGCGAGCTGTATAAGAAGGAC
CACAGGACCGAGGGAGAGGACAAGGCCCTGGATAAGATCAGGGCCGTGCTGAGGGG
CCTGATCGTGGGAGCCTTCACCGGCGTGTGCGGCCGGCGGGAGAACACAGTGCAGA
ATGAGAAGTATGAGAGCCTGTTTAAGGAGAAGCTGATCAAGGAGATCCTGCCAGAT
TTCGTGCTGTCTACAGAGGCCGAGTCCCTGCCCTTTTCTGTGGAGGAGGCCACCAGA
AGCCTGAAGGAGTTCGACTCCTTTACATCTTACTTCGCCGGCTTTTATGAGAACCGGA
AGAATATCTACTCTACCAAGCCCCAGAGCACAGCCATCGCCTATAGACTGATCCACG
AGAACCTGCCTAAGTTCATCGATAATATCCTGGTGTTTCAGAAGATCAAGGAGCCAA
TCGCCAAGGAGCTGGAGCACATCAGGGCAGACTTCAGCGCCGGCGGCTACATCAAG
AAGGATGAGCGCCTGGAGGACATCTTTTCCCTGAACTACTATATCCACGTGCTGTCTC
AGGCCGGCATCGAGAAGTACAATGCCCTGATCGGCAAGATCGTGACCGAGGGCGAT
GGCGAGATGAAGGGCCTGAACGAGCACATCAACCTGTATAATCAGCAGAGGGGCCG
CGAGGACCGGCTGCCACTGTTCAGACCCCTGTATAAGCAGATCCTGTCTGATAGGGA
GCAGCTGTCCTATCTGCCAGAGTCTTTCGAGAAGGACGAGGAGCTGCTGAGGGCCCT
GAAGGAGTTTTACGATCACATCGCAGAGGACATCCTGGGAAGGACCCAGCAGCTGA
TGACAAGCATCTCCGAGTACGATCTGTCCCGGATCTATGTGAGAAACGATAGCCAGC
TGACCGACATCTCCAAGAAGATGCTGGGCGATTGGAATGCCATCTACATGGCCCGGG
AGAGAGCCTATGACCACGAGCAGGCCCCCAAGCGCATCACAGCCAAGTACGAGAGG
GACCGCATCAAGGCCCTGAAGGGCGAGGAGTCTATCAGCCTGGCCAACCTGAACAG
CTGCATCGCCTTCCTGGACAACGTGAGGGATTGTCGCGTGGACACCTATCTGTCTAC
ACTGGGACAGAAGGAGGGACCTCACGGCCTGAGCAACCTGGTGGAGAACGTGTTCG
CCTCCTACCACGAGGCCGAGCAGCTGCTGTCTTTTCCCTATCCTGAGGAGAACAATCT
GATCCAGGACAAGGATAACGTGGTGCTGATCAAGAACCTGCTGGATAATATCAGCG
ACCTGCAGAGGTTCCTGAAGCCACTGTGGGGCATGGGCGATGAGCCCGACAAGGAT
GAGAGGTTTTACGGCGAGTACAATTATATCAGGGGCGCCCTGGACCAGGTCATCCCT
CTGTATAACAAGGTGCGGAATTATCTGACCCGCAAGCCATACTCCACACGCAAGGTG
AAGCTGAACTTCGGCAATAGCCAGCTGCTGTCCGGCTGGGATAGGAACAAGGAGAA
GGACAATTCTTGCGTGATCCTGCGCAAGGGCCAGAACTTCTACCTGGCCATCATGAA
CAATCGGCACAAGCGGAGCTTCGAGAATAAGATGCTGCCCGAGTATAAGGAGGGCG
AGCCTTACTTCGAGAAGATGGATTATAAGTTTCTGCCAGACCCCAACAAGATGCTGC
CCAAGGTGTTCCTGTCTAAGAAGGGCATCGAGATCTACAAGCCTAGCCCAAAGCTGC
TGGAGCAGTATGGCCACGGCACCCACAAGAAGGGCGATACCTTCAGCATGGACGAT
CTGCACGAGCTGATCGACTTCTTTAAGCACTCCATCGAGGCCCACGAGGATTGGAAG
CAGTTCGGCTTTAAGTTCAGCGACACCGCCACATACGAGAACGTGAGCAGCTTCTAC
CGGGAGGTGGAGGACCAGGGCTACAAGCTGTCTTTTAGAAAGGTGTCCGAGTCTTAC
GTGTATAGCCTGATCGATCAGGGCAAGCTGTACCTGTTCCAGATCTATAACAAGGAC
TTTAGCCCTTGTTCCAAGGGCACCCCAAATCTGCACACACTGTACTGGCGGATGCTGT
TCGATGAGAGAAACCTGGCCGACGTGATCTATAAGCTGGATGGCAAGGCCGAGATC
TTCTTTCGGGAGAAGTCCCTGAAGAATGACCACCCAACCCACCCTGCAGGCAAGCCC
ATCAAGAAGAAGAGCCGGCAGAAGAAGGGCGAGGAGAGCCTGTTCGAGTACGATCT
GGTGAAGGACCGGAGATATACCATGGATAAGTTTCAGTTCCACGTGCCAATCACAAT
GAACTTTAAGTGCTCTGCCGGCAGCAAGGTGAACGACATGGTGAATGCCCACATCAG
GGAGGCCAAGGACATGCACGTGATCGGCATCGATAGGGGCGAGCGCAATCTGCTGT
ATATCTGCGTGATCGACAGCCGCGGCACCATCCTGGATCAGATCTCCCTGAACACAA
TCAATGACATCGATTATCACGATCTGCTGGAGTCCAGGGACAAGGATCGCCAGCAGG
AGCACAGGAACTGGCAGACCATCGAGGGCATCAAGGAGCTGAAGCAGGGCTACCTG
TCTCAGGCCGTGCACCGCATCGCCGAGCTGATGGTGGCCTATAAGGCCGTGGTGGCC
CTGGAGGACCTGAACATGGGTTCAAGCGGGGCAGACAGAAGGTGGAGAGCAGCGT
GTACCAGCAGTTTGAGAAGCAGCTGATCGACAAGCTGAATTATCTGGTGGATAAGAA
GAAGCGGCCCGAGGACATCGGAGGCCTGCTGAGAGCCTACCAGTTCACCGCCCCTTT
CAAGAGCTTTAAGGAGATGGGCAAGCAGAACGGCTTTCTGTTCTATATCCCTGCCTG
GAACACATCCAATATCGACCCAACCACAGGCTTCGTGAACCTGTTTCACGTGCAGTA
CGAGAATGTGGATAAGGCCAAGAGCTTCTTTCAGAAGTTCGACAGCATCTCCTACAA
CCCTAAGAAGGATTGGTTTGAGTTCGCCTTTGACTATAAGAACTTCACCAAGAAGGC
CGAGGGCTCTAGGAGCATGTGGATTCTGTGCACCCACGGCTCCCGGATCAAGAACTT
CAGAAATTCTCAGAAGAATGGCCAGTGGGATAGCGAGGAGTTTGCCCTGACCGAGG
CCTTCAAGTCCCTGTTTGTGCGGTACGAGATCGATTATACCGCCGACCTGAAAACCG
CCATCGTGGACGAGAAGCAGAAGGATTTCTTTGTGGACCTGCTGAAGCTGTTCAAGC
TGACCGTGCAGATGAGAAACTCCTGGAAGGAGAAGGACCTGGATTACCTGATCTCTC
CAGTGGCCGGCGCCGATGGCAGGTTCTTTGACACACGCGAGGGCAATAAGAGCCTG
CCCAAGGACGCAGATGCAAACGGAGCCTATAATATCGCCCTGAAGGGCCTGTGGGC
ACTGAGGCAGATCAGACAGACCTCCGAGGGCGGCAAGCTGAAGCTGGCCATCTCTA
ACAAGGAGTGGCTGCAGTTTGTGCAGGAGAGATCCTACGAGAAGGACAAAAGGCCG
GCGGCCACGAAAAAAGGCCGGCCAGGCAAAAAAGAAAAAGGGATCCTACCCATACGATG
TTCCAGATTACGCTTATCCCTACGACGTGCCTGATTATGCATACCCATATGATGT
CCCCGACTATGCCTAAGAATTC

[chemical structure]

(SEQ ID NO: 228)
ATGGAGAACTATCAGGAGTTCACCAACCTGTTTCAGCTGAATAAGACACT
GAGATTCGAGCTGAAGCCCATCGGCAAGACCTGCGAGCTGCTGGAGGAGGGCAAGA
TCTTCGCCAGCGGCTCCTTTCTGGAGAAGGACAAGGTGAGGGCCGATAACGTGAGCT
ACGTGAAGAAGGAGATCGACAAGAAGCACAAGATCTTTATCGAGGAGACACTGAGC
TCCTTCTCTATCAGCAACGATCTGCTGAAGCAGTACTTTGACTGCTATAATGAGCTGA
AGGCCTTCAAGAAGGACTGTAAGAGCGATGAGGAGGAGGTGAAGAAAACCGCCCTG
CGCAACAAGTGTACCTCCATCCAGAGGGCCATGCGCGAGGCCATCTCTCAGGCCTTT
CTGAAGAGCCCCCAGAAGAAGCTGCTGGCCATCAAGAACCTGATCGAGAACGTGTT
CAAGGCCGACGAGAATGTGCAGCACTTCTCCGAGTTTACCAGCTATTTCTCCGGCTTT
GAGACAAACAGAGAGAATTTCTACTCTGACGAGGAGAAGTCCACATCTATCGCCTAT
AGGCTGGTGCACGATAACCTGCCTATCTTCATCAAGAACATCTACATCTTCGAGAAG
CTGAAGGAGCAGTTCGACGCCAAGACCCTGAGCGAGATCTTCGAGAACTACAAGCT
GTATGTGGCCGGCTCTAGCCTGGATGAGGTGTTCTCCCTGGAGTACTTTAACAATACC
CTGACACAGAAGGGCATCGACAACTATAATGCCGTGATCGGCAAGATCGTGAAGGA
GGATAAGCAGGAGATCCAGGGCCTGAACGAGCACATCAACCTGTATAATCAGAAGC
ACAAGGACCGGAGACTGCCCTTCTTTATCTCCCTGAAGAAGCAGATCCTGTCCGATC
GGGAGGCCCTGTCTTGGCTGCCTGACATGTTCAAGAATGATTCTGAAGTGATCAAGG
CCCTGAAGGGCTTCTACATCGAGGACGGCTTTGAGAACAATGTGCTGACACCTCTGG
CCACCCTGCTGTCCTCTCTGGATAAGTACAACCTGAATGGCATCTTTATCCGCAACAA
TGAGGCCCTGAGCTCCCTGTCCCAGAACGTGTATCGGAATTTTTCTATCGACGAGGC
CATCGATGCCAACGCCGAGCTGCAGACCTTCAACAATTACGAGCTGATCGCCAATGC
CCTGCGCGCCAAGATCAAGAAGGAGACAAAGCAGGGCCGGAAGTCTTTCGAGAAGT
ACGAGGAGTATATCGATAAGAAGGTGAAGGCCATCGACAGCCTGTCCATCCAGGAG
ATCAACGAGCTGGTGGAGAATTACGTGAGCGAGTTTAACTCTAATAGCGGCAACATG
CCAAGAAAGGTGGAGGACTACTTCAGCCTGATGAGGAAGGGCGACTTCGGCTCCAA
CGATCTGATCGAAAATATCAAGACCAAGCTGAGCGCCGCAGAGAAGCTGCTGGGCA
CAAAGTACCAGGAGACAGCCAAGGACATCTTCAAGAAGGATGAGAACTCCAAGCTG
ATCAAGGAGCTGCTGGACGCCACCAAGCAGTTCCAGCACTTTATCAAGCCACTGCTG
GGCACAGGCGAGGAGGCAGATCGGGACCTGGTGTTCTACGGCGATTTTCTGCCCCTG
TATGAGAAGTTTGAGGAGCTGACCCTGCTGTATAACAAGGTGCGGAATAGACTGACA
CAGAAGCCCTATTCCAAGGACAAGATCCGCCTGTGCTTCAACAAGCCTAAGCTGATG
ACAGGCTGGGTGGATTCCAAGACCGAGAAGTCTGACAACGGCACACAGTACGGCGG
CTATCTGTTTCGGAAGAAGAATGAGATCGGCGAGTACGATTATTTTCTGGGCATCTCT
AGCAAGGCCCAGCTGTTCAGAAAGAACGAGGCCGTGATCGGCGACTACGAGAGGCT
GGATTACTATCAGCCAAAGGCCAATACCATCTACGGCTCTGCCTATGAGGGCGAGAA
CAGCTACAAGGAGGACAAGAAGCGGCTGAACAAAGTGATCATCGCCTATATCGAGC
AGATCAAGCAGACAAACATCAAGAAGTCTATCATCGAGTCCATCTCTAAGTATCCTA
ATATCAGCGACGATGACAAGGTGACCCCATCCTCTCTGCTGGAGAAGATCAAGAAG
GTGTCTATCGACAGCTACAACGGCATCCTGTCCTTCAAGTCTTTTCAGAGCGTGAACA
AGGAAGTGATCGATAACCTGCTGAAAACCATCAGCCCCTGAAGAACAAGGCCGAG
TTTCTGGACCTGATCAATAAGGATTATCAGATCTTCACCGAGGTGCAGGCCGTGATC
GACGAGATCTGCAAGCAGAAAACCTTCATCTACTTTCCAATCTCCAACGTGGAGCTG
GAGAAGGAGATGGGCGATAAGGACAAGCCCCTGTGCCTGTTCCAGATCAGCAATAA
GGATCTGTCCTTCGCCAAGACCTTTAGCGCCAACCTGCGGAAGAAGAGAGGCGCCGA
GAATCTGCACACAATGCTGTTTAAGGCCCTGATGGAGGGCAACCAGGATAATCTGGA
CCTGGGCTCTGGCGCCATCTTCTACAGAGCCAAGAGCCTGGACGGCAACAAGCCCAC
ACACCCTGCCAATGAGGCCATCAAGTGTAGGAACGTGGCCAATAAGGATAAGGTGT
CCCTGTTCACCTACGACATCTATAAGAACAGGCGCTACATGGAGAATAAGTTCCTGT
TTCACCTGAGCATCGTGCAGAACTATAAGGCCGCCAATGACTCCGCCCAGCTGAACA
GCTCCGCCACCGAGTATATCAGAAAGGCCGATGACCTGCACATCATCGGCATCGATA
GGGGCGAGCGCAATCTGCTGTACTATTCCGTGATCGATATGAAGGGCAACATCGTGG
AGCAGGACTCTCTGAATATCATCAGGAACAATGACCTGGAGACAGATTACCACGACC
TGCTGGATAAGAGGGAGAAGGAGCGCAAGGCCAACCGGCAGAATTGGGAGGCCGTG
GAGGGCATCAAGGACCTGAAGAAGGGCTACCTGAGCCAGGCCGTGCACCAGATCGC
CCAGCTGATGCTGAAGTATAACGCCATCATCGCCCTGGAGGATCTGGGCCAGATGTT
TGTGACCCGCGGCCAGAAGATCGAGAAGGCCGTGTACCAGCAGTTCGAGAAGAGCC
TGGTGGATAAGCTGTCCTACCTGGTGGACAAGAAGCGGCCTTATAATGAGCTGGGCG
GCATCCTGAAGGCCTACCAGCTGGCCTCTAGCATCACCAAGAACAATTCTGACAAGC
AGAACGGCTTCCTGTTTTATGTGCCAGCCTGGAATACAAGCAAGATCGATCCCGTGA
CCGGCTTTACAGACCTGCTGCGGCCCAAGGCCATGACCATCAAGGAGGCCCAGGACT
TCTTTGGCGCCTTCGATAACATCTCTTACAATGACAAGGGCTATTTCGAGTTTGAGAC
AAACTACGACAAGTTTAAGATCAGAATGAAGAGCGCCCAGACCAGGTGGACAATCT
GCACCTTCGGCAATCGGATCAAGAGAAAGAAGGATAAGAACTACTGGAATTATGAG
GAGGTGGAGCTGACCGAGGAGTTCAAGAAGCTGTTTAAGGACAGCAACATCGATTA
CGAGAACTGTAATCTGAAGGAGGAGATCCAGAACAAGGACAATCGCAAGTTCTTTG
ATGACCTGATCAAGCTGCTGCAGCTGACACTGCAGATGCGGAACTCCGATGACAAGG
GCAATGATTATATCATCTCTCCTGTGGCCAACGCCGAGGGCCAGTTCTTTGACTCCCG
CAATGGCGATAAGAAGCTGCCACTGGATGCAGACGCAAACGGAGCCTACAATATCG
CCCGCAAGGGCCTGTGGAACATCCGGCAGATCAAGCAGACCAAGAACGACAAGAAG
CTGAATCTGAGCATCTCCTCTACAGAGTGGCTGGATTTCGTGCGGGAGAAGCCTTAC
CTGAAGAAAAGGCCGGCGGCCACGAAAAAGGCCGGCCAGGCAAAAAAGAAAAAGGGATC
CTACCCATACGATGTTCCAGATTACGCTTATCCCTACGACGTGCCTGATTATGC
ATACCCATATGATGTCCCCGACTATGCCTAAGAATTC

[chemical structure]

(SEQ ID NO: 229)
ATGAAAACCCAGCACTTCTTTGAGGACTTCACAAGCCTGTACTCTCTGAG
CAAGACCATCCGGTTTGAGCTGAAGCCAATCGGCAAGACCCTGGAGAACATCAAGA
AGAATGGCCTGATCCGGAGAGATGAGCAGAGACTGGACGATTACGAGAAGCTGAAG
AAAGTGATCGACGAGTATCACGAGGATTTCATCGCCAACATCCTGAGCTCCTTTTCCT
TCTCTGAGGAGATCCTGCAGTCCTACATCCAGAATCTGAGCGAGTCCGAGGCCAGGG
CCAAGATCGAGAAAACCATGCGCGACACACTGGCCAAGGCCTTCTCTGAGGATGAG
AGGTACAAGAGCATCTTTAAGAAGGAGCTGGTGAAGAAGGACATCCCCGTGTGGTG
CCCTGCCTATAAGAGCCTGTGCAAGAAGTTCGATAACTTTACCACATCTCTGGTGCCC
TTCCACGAGAACAGGAAGAACCTGTATACCAGCAATGAGATCACAGCCTCTATCCCT
TATCGCATCGTGCACGTGAACCTGCCAAAGTTTATCCAGAATATCGAGGCCCTGTGC
GAGCTGCAGAAGAAGATGGGCGCCGACCTGTACCTGGAGATGATGGAGAACCTGCG
CAACGTGTGGCCCAGCTTCGTGAAAACCCCAGACGACCTGTGCAACCTGAAAACCTA
TAATCACCTGATGGTGCAGTCTAGCATCAGCGAGTACAACAGGTTTGTGGGCGGCTA
TTCCACCGAGGACGGCACAAAGCACCAGGGCATCAACGAGTGGATCAATATCTACA
GACAGAGGAATAAGGAGATGCGCCTGCCTGGCCTGGTGTTCCTGCACAAGCAGATCC
TGGCCAAGGTGGACTCCTCTAGCTTCATCAGCGATACACTGGAGAACGACGATCAGG
TGTTTTGCGTGCTGAGACAGTTCAGGAAGCTGTTTTGGAATACCGTGTCCTCTAAGGA
GGACGATGCCGCCTCCCTGAAGGACCTGTTCTGTGGCCTGTCTGGCTATGACCCTGA
GGCCATCTACGTGAGCGATGCCCACCTGGCCACAATCTCCAAGAACATCTTTGACAG
ATGGAATTACATCTCCGATGCCATCAGGCGCAAGACCGAGGTGCTGATGCCACGGAA
GAAGGAGAGCGTGGAGAGATATGCCGAGAAGATCTCCAAGCAGATCAAGAAGAGA
CAGTCTTACAGCCTGGCCGAGCTGGACGATCTGCTGGCCCACTATAGCGAGGAGTCC
CTGCCCGCAGGCTTCTCTCTGCTGAGCTACTTTACATCTCTGGGCGGCCAGAAGTATC
TGGTGAGCGACGGCGAAGTGATCCTGTACGAGGAGGGCAGCAACATCTGGGACGAG
GTGCTGATCGCCTTCAGGGATCTGCAGGTCATCCTGGACAAGGACTTCACCGAGAAG
AAGCTGGGCAAGGATGAGGAGGCCGTGTCTGTGATCAAGAAGGCCCTGGACAGCGC
CCTGCGCCTGCGGAAGTTCTTTGATCTGCTGTCCGGCACAGGCGCAGAGATCAGGAG
AGACAGCTCCTTCTATGCCCTGTATACCGACCGGATGGATAAGCTGAAGGGCCTGCT
GAAGATGTATGATAAGGTGAGAAACTACCTGACCAAGAAGCCTTATTCCATCGAGA
AGTTCAAGCTGCACTTTGACAACCCATCCCTGCTGTCTGGCTGGGATAAGAATAAGG
AGCTGAACAATCTGTCTGTGATCTTCCGGCAGAACGGCTACTATTACCTGGGCATCA
TGACACCCAAGGGCAAGAATCTGTTCAAGACCCTGCCTAAGCTGGGGCGCCGAGGAG
ATGTTTTATGAGAAGATGGAGTACAAGCAGATCGCCGAGCCTATGCTGATGCTGCCA
AAGGTGTTCTTTCCCAAGAAAACCAAGCCAGCCTTCGCCCCAGACCAGAGCGTGGTG
GATATCTACAACAAGAAAACCTTCAAGACAGGCCAGAAGGGCTTTAATAAGAAGGA
CCTGTACCGGCTGATCGACTTCTACAAGGAGGCCCTGACAGTGCACGAGTGGAAGCT
GTTTAACTTCTCCTTTTCTCCAACCGAGCAGTATCGGAATATCGGCGAGTTCTTTGAC
GAGGTGAGAGAGCAGGCCTACAAGGTGTCCATGGTGAACGTGCCCGCCTCTTATATC
GACGAGGCCGTGGAGAACGGCAAGCTGTATCTGTTCCAGATCTACAATAAGGACTTC
AGCCCCTACTCCAAGGGCATCCCTAACCTGCACACACTGTATTGGAAGGCCCTGTTC
AGCGAGCAGAATCAGAGCCGGGTGTATAAGCTGTGCGGAGGAGGAGAGCTGTTTTA
TAGAAAGGCCAGCCTGCACATGCAGGACACCACAGTGCACCCCAAGGGCATCTCTAT
CCACAAGAAGAACCTGAATAAGAAGGGCGAGACAAGCCTGTTCAACTACGACCTGG
TGAAGGATAAGAGGTTTACCGAGGACAAGTTCTTTTTCCACGTGCCTATCTCTATCAA
CTACAAGAATAAGAAGATCACCAACGTGAATCAGATGGTGCGCGATTATATCGCCCA
GAACGACGATCTGCAGATCATCGGCATCGACCGCGGCGAGCGGAATCTGCTGTATAT
CAGCCGGATCGATACAAGGGGCAACCTGCTGGAGCAGTTCAGCCTGAATGTGATCG
AGTCCGACAAGGGCGATCTGAGAACCGACTATCAGAAGATCCTGGGCGATCGCGAG
CAGGAGCGGCTGAGGCGCCGGCAGGAGTGGAAGTCTATCGAGAGCATCAAGGACCT
GAAGGATGGCTACATGAGCCAGGTGGTGCACAAGATCTGTAACATGGTGGTGGAGC
ACAAGGCCATCGTGGTGCTGGAGAACCTGAATCTGAGCTTCATGAAGGGCAGGAAG
AAGGTGGAGAAGTCCGTGTACGAGAAGTTTGAGCGCATGCTGGTGGACAAGCTGAA
CTATCTGGTGGTGGATAAGAAGAACCTGTCCAATGAGCCAGGAGGCCTGTATGCAGC
ATACCAGCTGACCAATCCACTGTTCTCTTTTGAGGAGCTGCACAGATACCCCCAGAG
CGGCATCCTGTTTTTCGTGGACCCATGGAACACCTCTCTGACAGATCCCAGCACAGG
CTTCGTGAATCTGCTGGGCAGAATCAACTACACCAATGTGGGCGACGCCCGCAAGTT
TTTCGATCGGTTTAACGCCATCAGATATGACGGCAAGGGCAATATCCTGTTCGACCT
GGATCTGTCCAGATTTGATGTGAGGGTGGAGACACAGAGGAAGCTGTGGACACTGA
CCACATTCGGCTCTCGCATCGCCAAATCCAAGAAGTCTGGCAAGTGGATGGTGGAGC
GGATCGAGAACCTGAGCCTGTGCTTTCTGGAGCTGTTCGAGCAGTTTAATATCGGCT
ACAGAGTGGAGAAGGACCTGAAGAAGGCCATCCTGAGCCAGGATAGGAAGGAGTTC
TATGTGCGCCTGATCTACCTGTTTAACCTGATGATGCAGATCCGGAACAGCGACGGC
GAGGAGGATTATATCCTGTCTCCCGCCCTGAACGAGAAGAATCTGCAGTTCGACAGC
AGGCTGATCGAGGCCAAGGATCTGCCTGTGGACGCAGATGCAAACGGAGCATACAA
TGTGGCCCGCAAGGGCCTGATGGTGGTGCAGAGAATCAAGAGGGGCGACCACGAGT
CCATCCACAGGATCGGAAGGGCACAGTGGCTGAGATATGTGCAGGAGGGCATCGTG
GAGAAAAGGCCGGCGGCCACGAAAAAGGCCGGCCAGGCAAAAAGAAAAAGGGATCCT
ACCCATACGATGTTCCAGATTACGCTTATCCCTACGACGTGCCTGATTATGCAT
ACCCATATGATGTCCCCGACTATGCCTAAGAATTC
Amino acid sequence of human codon optimized Cpf1 orthologs
Nuclear localization signal (NLS)
Glycine-Serine linker
3x HA tag

[chemical structure]

(SEQ ID NO: 230)
MSIYQEFVNKYSLSKTLRFELIPQGKTLENIKARGLILDDEKRAKDYKKAKQII
DKYHQFFIEEILSSVCISEDLLQNYSDVYFKLKKSDDDNLQKDFKSAKDTIKKQISEYIKD
SEKFKNLFNQNLIDAKKGQESDLILWLKQSKDNGIELFKANSDITDIDEALEIIKSFKGWT
TYFKGFHENRKVNYSSNDIPTSIIYRIVDDNLPKFLENKAKYESLKDKAPEAINYEQIKKD
LAEELTFDIDYKTSEVNQRVFSLDEVFEIANFNNYLNQSGITKFNTIIGGKFVNGENTKRK
GINEYINLYSQQINDKTLKKYKMSVLFKQILSDTESKSFVIDKLEDDSDVVTTMQSFYEQI
AAFKTVEEKSIKETLSLLFDDLKAQKLDLSKIYFKNDKSLTDLSQQVFDDYSVIGTAVLE
YITQQIAPKNLDNPSKKEQELIAKKTEKAKYLSLETIKLALEEFNKHRDIDKQCRFEEILA
NFAAIPMIFDEIAQNKDNLAQISIKYQNQGKKDLLQASAEDDVKAIKDLLDQTNNLLHKL
KIFHISQSEDKANILDKDEHFYLVFEECYFELANIVPLYNKIRNYITQKPYSDEKFKLNFEN
STLANGWDKNKEPDNTAILFIKDDKYYLGVMNKKNNKIFDDKAIKENKGEGYKKIVYK
LLPGANKMLPKVFFSAKSIKFYNPSEDILRIRNHSTHTKNGSPQKGYEKFEFNIEDCRKFID
FYKQSISKHPEWKDFGFRFSDTQRYNSIDEFYREVENQGYKLTFENISESYIDSVVNQGKL
YLFQIYNKDFSAYSKGRPNLHTLYWKALFDERNLQDVVYKLNGEAELFYRKQSIPKKIT
HPAKEAIANKNKDNPKKESVFEYDLIKDKRFTEDKFFFHCPITINFKSSGANKFNDEINLL
LKEKANDVHILSIDRGERHLAYYTLVDGKGNIIKQDTFNIIGNDRMKTNYHDKLAAIEKD
RDSARKDWKKINNIKEMKEGYLSQVVHEIAKLVIEYNAIVVFEDLNFGFKRGRFKVEKQ
VYQKLEKMLIEKLNYLVFKDNEFDKTGGVLRAYQLTAPFETFKKMGKQTGIIYYVPAGF
TSKICPVTGFVNQLYPKYESVSKSQEFFSKFDKICYNLDKGYFEFSFDYKNFGDKAAKGK
WTIASFGSRLINFRNSDKNHNWDTREVYPTKELEKLLKDYSIEYGHGECIKAAICGESDK
KFFAKLTSVLNTILQMRNSKTGTELDYLISPVADVNGNFFDSRQAPKNMPQDADANGAY
HIGLKGLMLLGRIKNNQEGKKLNLVIKNEEYFEFVQNRNNKRPAATKKAGQAKKKKGSY
PYDVPDYAYPYDVPDYAYPYDVPDYA
3-Lachnospiraceae bacterium MC2017 (Lb3Cpf1)
(SEQ ID NO: 231)
MDYGNGQFERRAPLTKTITLRLKPIGETRETIREQKLLEQDAAFRKLVE
TVTPIVDDCIRKIADNALCHFGTEYDFSCLGNAISKNDSKAIKKETEKVEKLLAKV
LTENLPDGLRKVNDINSAAFIQDTLTSFVQDDADKRVLIQELKGKTVLMQRFLTT
RITALTVWLPDRVFENFNIFIENAEKMRILLDSPLNEKIMKFDPDAEQYASLEFYG
QCLSQKDIDSYNLIISGIYADDEVKNPGINEIVKEYNQQIRGDKDESPLPKLKKLH
KQILMPVEKAFFVRVLSNDSDARSILEKILKDTEMLPSKIIEAMKEADAGDIAVYG
SRLHELSHVIYGDHGKLSQIIYDKESKRISELMETLSPKERKESKKRLEGLEEHIRK
STYTFDELNRYAEKNVMAAYIAAVEESCAEIMRKEKDLRTLLSKEDVKIRGNRH
NTLIVKNYFNAWTVFRNLIRILRRKSEAEIDSDFYDVLDDSVEVLSLTYKGENLC
RSYITKKIGSDLKPEIATYGSALRPNSRWWSPGEKFNVKFHTIVRRDGRLYYFILP
KGAKPVELEDMDGDIECLQMRKIPNPTIFLPKLVFKDPEAFFRDNPEADEFVFLSG
MKAPVTITRETYEAYRYKLYTVGKLRDGEVSEEEYKRALLQVLTAYKEFLENR
MIYADLNFGFKDLEEYKDSSEFIKQVETHNTFMCWAKVSSSQLDDLVKSGNGLL
FEIWSERLESYYKYGNEKVLRGYEGVLLSILKDENLVSMRTLLNSRPMLVYRPKE
SSKPMVVHRDGSRVVDRFDKDGKYIPPEVHDELYRFFNNLLIKEKLGEKARKILD
NKKVKVKVLESERVKWSKFYDEQFAVTFSVKKNADCLDTTKDLNAEVMEQYS
ESNRLILIRNTTDILYYLVLDKNGKVLKQRSLNIINDGARDVDWKERFRQVTKDR
NEGYNEWDYSRTSNDLKEVYLNYALKEIAEAVIEYNAILIIEKMSNAFKDKYSFL
DDVTFKGFETKKLAKLSDLHFRGIKDGEPCSFTNPLQLCQNDSNKILQDGVIFMV
PNSMTRSLDPDTGFIFAINDHNIRTKKAKLNFLSKFDQLKVSSEGCLIMKYSGDSL
PTHNTDNRVWNCCCNHPITNYDRETKKVEFIEEPVEELSRVLEENGIETDTELNK
LNERENVPGKVVDAIYSLVLNYLRGTVSGVAGQRAVYYSPVTGKKYDISFIQAM
NLNRKCDYYRIGSKERGEWTDFVAQLINKRPAATKKAGQAKKKKGSYPYDVPDY
AYPYDVPDYAYPYDVPDYA

[chemical structure]

(SEQ ID NO: 232)
MLLYENYTKRNQITKSLRLELRPQGKTLRNIKELNLLEQDKAIYALLERLKPV
IDEGIKDIARDTLKNCELSFEKLYEHFLSGDKKAYAKESERLKKEIVKTLIKNLPEGIGKIS
EINSAKYLNGVLYDFIDKTHKDSEEKQNILSDILETKGYLALFSKFLTSRITTLEQSMPKRV
IENFEIYAANIPKMQDALERGAVSFAIEYESICSVDYYNQILSQEDIDSYNRLISGIMDEDG
AKEKGINQTISEKNIKIKSEHLEEKPFRILKQLHKQILEEREKAFTIDHIDSDEEVVQVTKE
AFEQTKEQWENIKKINGFYAKDPGDITLFIVVGPNQTHVLSQLIYGEHDRIRLLLEEYEKN
TLEVLPRRTKSEDARYDKFVNAVPKKVAKESHTFDGLQKMTGDDRLFILYRDELARNY
MRIKEAYGTFERDILKSRRGIKGNRDVQESLVSFYDELTKFRSALRIINSGNDEKADPIFY
NTFDGIFEKANRTYKAENLCRNYVTKSPADDARIMASCLGTPARLRTHWWNGEENFAIN
DVAMIRRGDEYYYFVLTPDVKPVDLKTKDETDAQIFVQRKGAKSFLGLPKALFKCILEP
YFESPEHKNDKNCVIEEYVSKPLTIDRRAYDIFKNGTFKKTNIGIDGLTEEKFKDDCRYLI
DVYKEFIAVYTRYSCFNMSGLKRADEYNDIGEFFSDVDTRLCTMEWIPVSFERINDMVD
KKEGLLFLVRSMFLYNRPRKPYERTFIQLFSDSNMEHTSMLLNSRAMIQYRAASLPRRVT
HKKGSILVALRDSNGEHIPMHIREAIYKMKNNFDISSEDFIMAKAYLAEHDVAIKKANED
IIRNRRYTEDKFFLSLSYTKNADISARTLDYINDKVEEDTQDSRMAVIVTRNLKDLTYVA
VVDEKNNVLEEKSLNEIDGVNYRELLKERTKIKYHDKTRLWQYDVSSKGLKEAYVELA
VTQISKLATKYNAVVVVESMSSTFKDKFSFLDEQIFKAFEARLCARMSDLSFNTIKEGEA
GSISNPIQVSNNNGNSYQDGVIYFLNNAYTRTLCPDTGFVDVFDKTRLITMQSKRQFFAK
MKDIRIDDGEMLFTFNLEEYPTKRLLDRKEWTVKIAGDGSYFDKDKGEYVYVNDIVREQ
IIPALLEDKAVFDGNMAEKFLDKTAISGKSVELIYKWFANALYGIITKKDGEKIYRSPITGT
EIDVSKNTTYNFGKKFMFKQEYRGDGDFLDAFLNYMQAQDIAVKRPAATKKAGQAKKKK
GSYPYDVPDYAYPYDVPDYAYPYDVPDYA
5-Peregrinibacteria bacterium GW2011_GWA_33_10 (PeCpf1)
(SEQ ID NO: 233)
MSNFFKNFTNLYELSKTLRFELKPVGDTLTNMKDHLEYDEKLQTFLKDQNID
DAYQALKPQFDEIHEEFITDSLESKKAKEIDFSEYLDLFQEKKELNDSEKKLRNKIGETFN
KAGEKWKKEKYPQYEWKKGSKIANGADILSCQDMLQFIKYKNPEDEKIKNYIDDTLKGF
FTYFGGFNQNRANYYETKKEASTAVATRIVHENLPKFCDNVIQFKHIIKRKKDGTVEKTE
RKTEYLNAYQYLKNNNKITQIKDAETEKMIESTPIAEKIFDVYYFSSCLSQKQIEEYNRIIG
HYNLLINLYNQAKRSEGKHLSANEKKYKDLPKFKTLYKQIGCGKKKDLFYTIKCDTEEE
ANKSRNEGKESHSVEEIINKAQEAINKYFKSNNDCENINTVPDFINYILTKENYEGVYWS
KAAMNTISDKYFANYHDLQDRLKEAKVFQKADKKSEDDIKIPEAIELSGLFGVLDSLAD
WQTTLFKSSILSNEKLKIITDSQTPSEALLKMIFNDIEKNMESFLKETNDIITLKKYKGNK
EGTEKIKQWFDYTLAINRMLKYFLVKENKIKGNSLDTNISEALKTLIYSDDAEWFKWYD
ALRNYLTQKPQDEAKENKLKLNFDNPSLAGGWDVNKECSNFCVILKDKNEKKYLAMIK
KGENTLFQKEWTEGRGKNLTKKSNPLFEINNCEILSKMEYDFWADVSKMIPKCSTQLKA
VVNHFKQSDNEFIFPIGYKVTSGEKFREECKISKQDFELNNKVFNKNELSVTAMRYDLSS
TQEKQYIKAFQKEYWELLFKQEKRDTKLTNNEIFNEWINFCNKKYSELLSWERKYKDAL
TNWINFCKYFLSKYPKTTLFNYSFKESENYNSLDEFYRDVDICSYKLNINTTINKSILDRL
VEEGKLYLFEIKNQDSNDGKSIGHKNNLHTIYWNAIFENFDNRPKLNGEAEIFYRKAISK
DKLGIVKGKKTKNGTWIIKNYRFSKEKFILHVPITLNFCSNNEYVNDIVNTKFYNFSNLHF
LGIDRGEKHLAYYSLVNKNGEIVDQGTLNLPFTDKDGNQRSIKKEKYFYNKQEDKWEA
KEVDXWNYNDLLDAMASNRDMARKNWQRIGTIKEAKNGYVSLVIRKIADLAVNNERP
AFIVLEDLNTGFKRSRQKIDKSVYQKFELALAKKLNFLVDKNAKRDEIGSPTKALQLTPP
VNNYGDIENKKQAGIMLYTRANYTSQTDPATGWRKTIYLKAGPEETTYKKDGKIKNKS
VKDQIIETFTDIGFDGKDYYFEYDKGEFVDEKTGEIKPKKWRLYSGENGKSLDRFRGERE
KDKYEWKIDKIDIVKILDDLFVNFDKNISLLKQLKEGVELTRNNEHGTGESLRFAINLIQQI
RNTGNNERDNDFILSPVRDENGKHFDSREYWDKETKGEKISMPSSGDANGAFNIARKGII
MNAHILANSDSKDLSLFVSDEEWDLHLNNKTEWKKQLNIFSSRKAMAKRKKKRPAATKK
AGQAKKKKGSYPYDVPDYAYPYDVPDYAYPYDVPDYA
6-Parcubacteria bacterium GWC2011_GWC2_44_17 (PbCpf1)
(SEQ ID NO: 234)
MENIFDQFIGKYSLSKTLRFELKPVGKTEDFLKINKVFEKDQTIDDSYNQAKF
YFDSLHQKFIDAALASDKTSELSFQNFADVLEKQNKIILDKKREMGALRKRDKNAVGID
RLQKEINDAEDIIQKEKEKIYKDVRTLFDNEAESWKTYYQEREVDGKKITESKADLKQKG
ADFLTAAGILKVLKYEFPEEKEKEFQAKNQPSLFVEEKENPGQKRYIFDSFDKFAGYLTK
FQQTKKNLYAADGTSTAVATRIADNFIIFHQNTKVFRDKYKNNHTDLGFDEENIFEIERY
KNCLLQREIEHIKNENSYNKIIGRINKKIKEYRDQKAKDTKLTKSDFPFFKNLDKQILGEV
EKEKQLIEKTREKTEEDVLIERFKEFIENNEERFTAAKKLMNAFCNGEFESEYEGIYLKNK
AINTISRRWFVSDRDFELKLPQQKSKNKSEKNEPKVKKFISIAEIKNAVEELDGDIFKAVF
YDKKIIAQGGSKLEQFLVIWKYEFEYLFRDIERENGEKLLGYDSCLKIAKQLGIFPQEKEA
REKATAVIKNYADAGLGIFQMMKYFSLDDKDRKNTPGQLSTNFYAEYDGYYKDFEFIK
YYNEFRNFITKKPFDEDKIKLNFENGALLKGWDENKEYDFMGVILKKEGRLYLGIMHKN
HRKLFQSMGNAKGDNANRYQKMIYKQIADASKDVPRLLLTSKKAMEKFKPSQEILRIKK
EKTFKRESKNFSLRDLHALIEYYRNCIPQYSNWSFYDFQFQDTGKYQNIKEFTDDVQKYG
YKISFRDIDDEYINQALNEGKMYLFEVVNKDIYNTKNGSKNLHTLYFEHILSAENLNDPV
FKLSGMAEIFQRQPSVNEREKITTQKNQCILDKGDRAYKYRRYTEKKIMFHMSLVLNTG
KGEIKQVQFNKIINQRISSSDNEMRVNVIGIDRGEKNLLYYSVVKQNGEIIEQASLNEING
VNYRDKLIEREKERLKNRQSWKPVVKIKDLKKGYISHVIHKICQLIEKYSAIVVLEDLNM
RFKQIRGGIERSVYQQFEKALIDKLGYLVFKDNRDLRAPGGVLNGYQLSAPFVSFEKMR
KQTGILFYTQAEYTSKTDPITGFRKNVYISNSASLDKIKEAVKKFDAIGWDGKEQSYFFK
YNPYNLADEKYKNSTVSKEWAIFASAPRIRRQKGEDGYWKYDRVKVNEEFEKLLKVW
NFVNPKATDIKQEIIKKIKAGDLQGEKELDGRLRNFWHSFIYLFNLVLELRNSFSLQIKIK
AGEVIAVDEGVDFIASPVKPFFTTPNPYIPSNLCWLAVENADANGAYNIARKGVMILKKI
REHAKKDPEFKKLPNLFISNAEWDEAARDWGKYAGTTALNLDHKRPAATKKAGQAKKK
KGSYPYDVPDYAYPYDVPDYAYPYDVPDYA

[chemical structure]

(SEQ ID NO: 235)
MQTLFENFTNQYPVSKTLRFELIPQGKTKDFIEQKGLLKKDEDRAEKYKKVK
NIIDEYHKDFIEKSLNGLKLDGLEKYKTLYLKQEKDDKDKKAFDKEKENLRKQIANAFR
NNEKFKTLFAKELIKNDLMSFACEEDKKNVKEFEAFTTYFTGFHQNRANMYVADEKRT
AIASRLIHENLPKFIDNIKIFEKMKKEAPELLSPFNQTLKDMKDVIKGTTLEEIFSLDYFNK
TLTQSGIDIYNSVIGGRTPEEGKTKIKGLNEYINTDFNQKQTDKKKRQPKFKQLYKQILSD
RQSLSFIAEAFKNDTEILEAIEKFYVNELLHFSNEGKSTNVLDAIKNAVSNLESFNLTKMY
FRSGASLTDVSRKVFGEWSIINRALDNYYATTYPIKPREKSEKYEERKEKWLKQDFNVSL
IQTAIDEYDNETVKGKNSGKVIADYFAKFCDDKETDLIQKVNEGYIAVKDLLNTPCPENE
KLGSNKDQVKQIKAFMDSIMDIMHFVRPLSLKDTDKEKDETFYSLFTPLYDHLTQTIALY
NKVRNYLTQKPYSTEKIKLNFENSTLLGGWDLNKETDNTAIILRKDNLYYLGIMDKRHN
RIFRNVPKADKKDFCYEKMVYKLLPGANKMLPKVFFSQSRIQEFTPSAKLLENYANETH
KKGDNFNLNHCHKLIDFFKDSINKHEDWKNFDFRFSATSTYADLSGFYHEVEHQGYKISF
QSVADSFIDDLVNEGKLYLFQIYNKDFSPFSKGKPNLHTLYWKMLFDENNLKDVVYKLN
GEAEVFYRKKSIAEKNTTIHKANESIINKNPDNPKATSTFNYDIVKDKRYTIDKFQFHIPIT
MNFKAEGIFNMNQRVNQFLKANPDINIIGIDRGERHLLYYALINQKGKILKQDTLNVIAN
EKQKVDYHNLLDKKEGDRATARQEWGVIETIKELKEGYLSQVIHKLTDLMIENNAIIVM
EDLNFGFKRGRQKVEKQVYQKFEKMLIDKLNYLVDKNKKANELGGLLNAFQLANKFES
FQKMGKQNGFIFYVPAWNTSKTDPATGFIDFLKPRYENLNQAKDFFEKFDSIRLNSKADY
FEFAFDFKNFTEKADGGRTKWTVCTTNEDRYQWNRALNNNRGSQEKYDITAELKSLFD
GKVDYKSGKDLKQQIASQESADFFKALMKNLSITLSLRHNNGEKGDNEQDYILSPVADS
KGRFFDSRKADDDMPKNADANGAYHIALKGLWCLEQISKTDDLKKVKLAISNKEWLEF
VQTLKGKRPAATKKAGQAKKKKGSYPYDVPDYAYPYDVPDYAYPYDVPDYA

[chemical structure]

(SEQ ID NO: 236)
MTQFEGFTNLYQVSKTLRFELIPQGKTLKHIQEQGFIEEDKARNDHYKELKPII
DRIYKTYADQCLQLVQLDWENLSAAIDSYRKEKTEETRNALIEEQATYRNAIHDYFIGRT
DNLTDAINKRHAEIYKGLFKAELFNGKVLKQLGTVTTTEHENALLRSFDKFTTYFSGFYE
NRKNVFSAEDISTAIPHRIVQDNFPKFKENCHIFTRLITAVPSLREHFENVKKAIGIFVSTSI
EEVFSFPFYNQLLTQTQIDLYNQLLGGISREAGTEKIKGLNEVLNLAIQKNDETAHIIASLP
HRFIPLFKQILSDRNTLSFILEEFKSDEEVIQSFCKYKTLLRNENVLETAEALFNELNSIDLT
HIFISHKKLETISSALCDHWDTLRNALYERRISELTGKITKSAKEKVQRSLKHEDINLQEIIS
AAGKELSEAFKQKTSEILSHAHAALDQPLPTTLKKQEEKEILKSQLDSLLGLYHLLDWFA
VDESNEVDPEFSARLTGIKLEMEPSLSFYNKARNYATKKPYSVEKFKLNFQMPTLASGW
DVNKEKNNGAILFVKNGLYYLGIMPKQKGRYKALSFEPTEKTSEGFDKMYYDYFPDAA
KMIPKCSTQLKAVTAHFQTHTTPILLSNNFIEPLEITKEIYDLNNPEKEPKKFQTAYAKKT
GDQKGYREALCKWIDFTRDFLSKYTKTTSIDLSSLRPSSQYKDLGEYYAELNPLLYHISFQ
RIAEKEIMDAVETGKLYLFQIYNKDFAKGHHGKPNLHTLYWTGLFSPENLAKTSIKLNG
QAELFYRPKSRMKRMAHRLGEKMLNKKLKDQKTPIPDTLYQELYDYVNHRLSHDLSDE
ARALLPNVITKEVSHEIIKDRRFTSDKFFFHVPITLNYQAANSPSKFNQRVNAYLKEHPET
PIIGIDRGERNLIYITVIDSTGKILEQRSLNTIQQFDYQKKLDNREKERVAARQAWSVVGTI
KDLKQGYLSQVIHEIVDLMIHYQAVVVLENLNFGFKSKRTGIAEKAVYQQFEKMLIDKL
NCLVLKDYPAEKVGGVLNPYQLTDQFTSFAKMGTQSGFLFYVPAPYTSKIDPLTGFVDPF
VWKTIKNHESRKHFLEGFDFLHYDVKTGDFILHFKMNRNLSFQRGLPGFMPAWDIVFEK
NETQFDAKGTPFIAGKRIVPVIENHRFTGRYRDLYPANELIALLEEKGIVFRDGSNILPKLL
ENDDSHAIDTMVALIRSVLQMRNSNAATGEDYINSPVRDLNGVCFDSRFQNPEWPMDA
DANGAYHIALKGQLLLNHLKESKDLKLQNGISNQDWLAYIQELRNKRPAATKKAGQAKK
KKGSYPYDVPDYAYPYDVPDYAYPYDVPDYA
9-Lachnospiraceae bacterium MA2020 (Lb2Cpf1)
(SEQ ID NO: 237)
MYYESLTKQYPVSKTIRNELIPIGKTLDNIRQNNILESDVKRKQNYEHVKGIL
DEYHKQLINEALDNCTLPSLKIAAEIYLKNQKEVSDREDFNKTQDLLRKEVVEKLKAHE
NFTKIGKKDILDLLEKLPSISEDDYNALESFRNFYTYFTSYNKVRENLYSDKEKSSTVAYR
LINENFPKFLDNVKSYRFVKTAGILADGLGEEEQDSLFIVETFNKTLTQDGIDTYNSQVGK
INSSINLYNQKNQKANGFRKIPKMKMLYKQILSDREESFIDEFQSDEVLIDNVESYGSVLIE
SLKSSKVSAFFDALRESKGKNVYVKNDLAKTAMSVIVFENWRTFDDLLNQEYDLANEN
KKKDDKYFEKRQKELKKNKSYSLEHLCNLSEDSCNLIENYIHQISDDIENIIINNETFLRIVI
NEHDRSRKLAKNRKAVKAIKDFLDSIKVLERELKLINSSGQELEKDLIVYSAHEELLVEL
KQVDSLYNMTRNYLTKKPFSTEKVKLNFNRSTLLNGWDRNKETDNLGVLLLKDGKYYL
GIMNTSANKAFVNPPVAKTEKVFKKVDYKLLPVPNQMLPKVFFAKSNIDFYNPSSEIYSN
YKKGTHKKGNMFSLEDCHNLIDFFKESISKHEDWSKFGFKFDTQASYNDISEFYREVEKQ
GYKLTYTDIDETYINDLIERNELYLFQIYNKDFSMYSKGKLNLHTLYFMMLFDQRNIDDV
VYKLNGEAEVFYRPASISEDELIIHKAGEEIKNKNPNRARTKETSTFSYDIVKDKRYSKDK
FTLHIPITMNFGVDEVKRFNDAVNSAIRIDENVNVIGIDRGERNLLYVVVIDSKGNILEQIS
LNSIINKEYDIETDYHALLDEREGGRDKARKDWNTVENIRDLKAGLYLQVVNVVAKLVL
KYNAIICLEDLNFGFKRGRQKVEKQVYQKFEKMLIDKLNYLVIDKSREQTSPKELGGAL
NALQLTSKFKSFKELGKQSGVIYYVPAYLTSKIDPTTGFANLFYMKCENVEKSKRFFDGF
DFIRFNALENVFEFGFDYRSFTQRACGINSKWTVCTNGERIIKYRNPDKNNMFDEKVVVV
TDEMKNLFEQYKIPYEDGRNVKDMIISNEEAEFYRRLYRLLQQTLQMRNSTSDGTRDYII
SPVKNKREAYFNSELSDGSVPKDADANGAYNIARKGLWVLEQIRQKSEGEKINLAMTNA
EWLEYAQTHLLKRPAATKKAGQAKKKKGSYPYDVPDYAYPYDVPDYAYPYDVPDYA
10-Candidatus Methanoplasma termitum (CMtCpf1)
(SEQ ID NO: 238)
MNNYDEFTKLYPIQKTIRFELKPQGRTMEHLETFNFFEEDRDRAEKYKILKEA
IDEYHKKFIDEHLTNMSLDWNSLKQISEKYYKSREEKDKKVFLSEQKRMRQEIVSEFKKD
DRFKDLFSKKLFSELLKEEIYKKGNHQEIDALKSFDKFSGYFIGLHENRKNMYSDGDEIT
AISNRIVNENFPKFLDNLQKYQEARKKYPEWIIKAESALVAHNIKMDIVFSLEYFNKVLN
QEGIQRYNLALGGYVTKSGEKMMGLNDALNLAHQSEKSSKGRIHMTPLFKQILSEKESF
SYIPDVFTEDSQLLPSIGGFFAQIENDKDGNIFDRALELISSYAEYDTERIYIRQADINRVSN
VIFGEWGTLGGLMREYKADSINDINLERTCKKVDKWLDSKEFALSDVLEAIDRTGNNDA
FNEYISKMRTAREKIDAARKEMKFISEKISGDEESIHIIKTLLDSVQQFLHFFNLFKARQDIP
LDGAFYAEFDEVHSKLFAIVPLYNKVRNYLTKNNLNTKKIKLNFKNPTLANGWDQNKV
YDYASLIFLRDGNYYLGIINPKRKKNIKFEQGSGNGPFYRKMVYKQIPGPNKNLRPVFLT
STKGKKEYKPSKEIIEGYEADKHIRGDKFDLDFCHKLIDFFKESIEKHKDWSKFNFYFSPT
ESYGDISEFYLDVEKQGYRMHFENISAETIDEYVEKGDLFLFQIYNKDFVKAATGKKDM
HTIYWNAAFSPENLQDVVVKLNGEAELFYRDKSDIKEIVHREGEILVNRTYNGRTPVPDK
IHKKLTDYHNGRTKDLGEAKEYLDKVRYFKAHYDITKDRRYLNDKIYFHVPLTLNFKAN
GKKNLNKMVIEKFLSDEKAHIIGIDRGERNLLYYSIIDRSGKIIDQQSLNVIDGFDYREKLN
QREIEMKDARQSWNAIGKIKDLKEGYLSKAVHEITKMAIQYNAIVVMEELNYGFKRGRF
KVEKQIYQKFENMLIDKMNYLVFKDAPDESPGGVLNAYQLTNPLESFAKLGKQTGILFY
VPAAYTSKIDPTTGFVNLFNTSSKTNAQERKEFLQKFESISYSAKDGGIFAFAFDYRKFGT
SKTDHKNVWTAYTNGERMRYIKEKKRNELFDPSKEIKEALTSSGIKYDGGQNILPDILRS
NNNGLIYTMYSSFIAAIQMRVYDGKEDYIISPIKNSKGEFFRTDPKRRELPIDADANGAYN
IALRGELTMRAIAEKFDPDSEKMAKLELKHKDWFEFMQTRGDKRPAATKKAGQAKKKKG
SYPYDVPDYAYPYDVPDYAYPYDVPDYA

[chemical structure]

(SEQ ID NO: 239)
MNGNRSIVYREFVGVIPVAKTLRNELRPVGHTQEHIIQNGLIQEDELRQEKST
ELKNIMDDYYREYIDKSLSGVTDLDFTLLFELMNLVQSSPSKDNKKALEKEQSKMREQIC
THLQSDSNYKNIFNAKLLKEILPDFIKNYNQYDVKDKAGKLETLALFNGFSTYFTDFFEK
RKNVFTKEAVSTSIAYRIVHENSLIFLANMTSYKKISEKALDEIEVIEKNNQDKMGDWEL
NQIFNPDFYNMVLIQSGIDFYNEICGVVNAHMNLYCQQTKNNYNLFKMRKLHKQILAYT
STSFEVPKMFEDDMSVYNAVNAFIDETEKGNIIGKLKDIVNKYDELDEKRIYISKDFYETL
SCFMSGNWNLITGCVENFYDENIHAKGKSKEEKVKKAVKEDKYKSINDVNDLVEKYIDE
KERNEFKNSNAKQYIREISNIITDTETAHLEYDDHISLIESEEKADEMKKRLDMYMNMYH
WAKAFIVDEVLDRDEMFYSDIDDIYNILENIVPLYNRVRNYVTQKPYNSKKIKLNFQSPT
LANGWSQSKEFDNNAIILIRDNKYYLAIFNAKNKPDKKIIQGNSDKKNDNDYKKMVYNL
LPGANKMLPKVFLSKKGIETFKPSDYIISGYNAHKHIKTSENFDISFCRDLIDYFKNSIEKH
AEWRKYEFKFSATDSYSDISEFYREVEMQGYRIDWTYISEADINKLDEEGKIYLFQIYNK
DFAENSTGKENLHTMYFKNIFSEENLDKIIKLNGQAELFYRRASVKNPVKHKKDSVLVN
KTYKNQLDNGDVVRIPIPDDIYNEIYKMYNGYIKESDLSEAAKEYLDKVEVRTAQKDIV
KDYRYTVDKYFIHTPITINYKVTARNNVNDMVVKYIAQNDDIHVIGIDRGERNLIYISVID
SHGNIVKQKSYNILNNYDYKKKLVEKEKTREYARKNWKSIGNIKELKEGYISGVVHEIA
MLIVEYNAIIAMEDLNYGFKRGRFKVERQVYQKFESMLINKLNYFASKEKSVDEPGGLL
KGYQLTYVPDNIKNLGKQCGVIFYVPAAFTSKIDPSTGFISAFNFKSISTNASRKQFFMQF
DEIRYCAEKDMFSFGFDYNNFDTYNITMGKTQWTVYTNGERLQSEFNNARRTGKTKSIN
LTETIKLLLEDNEINYADGHDIRIDMEKMDEDKKSEFFAQLLSLYKLTVQMRNSYTEAEE
QENGISYDKIISPVINDEGEFFDSDNYKESDDKECKMPKDADANGAYCIALKGLYEVLKI
KSEWTEDGFDRNCLKLPHAEWLDFIQNKRYEKRPAATKKAGQAKKKKGSYPYDVPDYA
YPYDVPDYAYPYDVPDYA

[chemical structure]

(SEQ ID NO: 240)
MLFQDFTHLYPLSKTVRFELFIDRTLEHIHAKNFLSQDETMADMHQKVKVI
LDDYHRDFIADMMGEVKLTKLAEFYDVYLKFRKNPKDDELQKAQLKDLQAVLRKEIVKP
IGNGGKYKAGYDRLFGAKLFKDGKELGDLAKFVIAQEGESSPKLAHLAHFEKFSTYFTG
FHDNRKNMYSDEDKHTAIAYRLIHENLPRFIDNLQILTTIKQKHSALYDQIINELTASGLD
VSLASHLDGYHKLLTQEGITAYNTLLGGISGEAGSPKIQGINELINSHHNQHCHKSERIAK
LRPLHKQILSDGMSVSFLPSKFADDSEMCQAVNEFYRHYADVFAKVQSLFDGFDDHQK
DGIYVEHKNLNELSKQAFGDFALLGRVLDGYYVDVVNPEFNERFAKAKTDNAKAKLTK
EKDKFIKGVHSLASLEQAIEHYTARHDDESVQAGKLGQYFKHGLAGVDNPIQKIHNNHS
TIKGFLERERPAGERALPKIKSGKNPEMTQLRQLKELLDNALNVAHFAKLLTTKTTLDNQ
DGNFYGEFGVLYDELAKIPTLYNKVRDYLSQKPFSTEKYKLNFGNPTLLNGWDLNKEKD
NFGVILQKDGCYYLALLDKAHKKVFDNAPNTGKSIYQKMIYKYLEVRKQFPKVFFSKEA
IAINYHPSKELVEIKDKGRQRSDDERLKLYRFILECLKIHPKYDKKFEGAIGDIQLFKKDK
KGREVPISEKDLFKDINGIFSSKPKLEMEDFFIGEFKRYNPSQDLVDQYNIYKKIDSNDNR
KKENFYNNHPKFKKDLVRYYYESMCKHEEWEESFEFSKKLQDIGCYVDVNELFTEIETR
RLNYKISFCNINADYIDELVEQGQLYLFQIYNKDFSPKAHGKPNLHTLYFKALFSEDNLA
DPIYKLNGEAQIFYRKASLDMNETTIHRAGEVLENKNPDNPKKRQFVYDIIKDKRYTQKD
FMLHVPITMNFGVQGMTIKEFNKKVNQSIQQYDEVNVIGIDRGERHLLYLTVINSKGEIL
EQCSLNDITTASANGTQMTTPYHKILDKREIERLNARVGWGEIETIKELKSGYLSHVVHQI
SQLMLKYNAIVVLEDLNFGFKRGRFKVEKQIYQNFENALIKKLNHLVLKDKADDEIGSY
KNALQLTNNFTDLKSIGKQTGFLFYVPAWNTSKIDPETGFVDLLKPRYENIQASQAFFGK
FDKICYNADKDYFEFHIDYAKFTDKAKNSRQIWTICSHGDKRYVYDKTANQNKGAAKGI
NVNDILKSLFARHHINEKQPNLVMDICQNNDKEFHKSLMYLLKTLLALRYSNASSDEDF
ILSPVANDEGVFFNSALADDTQPQNADANGAYHIALKGLWLLNELKNSDDLNKVKLAID
NQTWLNFAQNRKRPAATKKAGQAKKKKGSYPYDVPDYAYPYDVPDYAYPYDVPDYA

[chemical structure]

(SEQ ID NO: 241)
MEDYSGFVNIYSIQKTLRFELKPVGKTLEHIEKKGFLKKDKIRAEDYKAVKKI
IDKYHRAYIEEVFDSVLHQKKKKDKTRFSTQFIKEIKEFSELYYKTEKNIPDKERLEALSE
KLRKMLVGAFKGEFSEEVAEKYNKNLFSKELIRNEIEKFCETDEERKQVSNFKSFTTYFTGF
HSNRQNIYSDEKKSTAIGYRIIHQNLPKFLDNLKIIESIQRRFKDFPWSDLKKNLKKIDKNI
KLTEYFSIDGFVNVLNQKGIDAYNTILGGKSEESGEKIQGLNEYINLYRQKNNIDRKNPLN
VKILFKQILGDRETKSFIPEAFPDDQSVLNSITEFAKYLKLDKKKKSIIAELKKFLSSFNRYE
LDGIYLANDNSLASISTFLFDDWSFIKKSVSFKYDESVGDPKKKIKSPLKYEKEKEKWLK
QKYYTISFLNDAIESYSKSQDEKRVKIRLEAYFAEFKSKDDAKKQFDLLERIEEAYAIVEP
LLGAEYPRDRNLKADKKEVGKIKDFLDSIKSLQFFLKPLLSAEIFDEKDLGFYNQLEGYY
EEIDISGHLYNKVRNYLTGKIYSKEKFKLNFENSTLLKGWDENREVANLCVIFREDQKYY
LGVMDKENNTILSDIPKVKPNELFYEKMVYKLIPTPHMQLPRIIFSSDNLSIYNPSKSILKIR
EAKSFKEGKNFKLKDCHKFIDFYKESISKNEDWSRFDFKFSKTSSYENISEFYREVERQGY
NLDFKKVSKFYIDSLVEDGKLYLFQIYNKDFSIFSKGKPNLHTIYFRSLFSKENLKDVCLK
LNGEAEMFFRKKSINYDEKKKREGHHPELFEKLKYPILKDKRYSEDKFQFHLPISLNFKS
KERLNFNLKVNEFLKRNKDINIIGIDRGERNLLYLVMINQKGEILKQTLLDSMQSGKGRP
EINYKEKLQEKEIERDKARKSWGTVENIKELKEGYLSIVIHQISKLMVENNAIVVLEDLNI
GFKRGRQKVERQVYQKFEKMLIDKLNFLVFKENKPTEPGGVLKAYQLTDEFQSFEKLSK
QTGFLFYVPSWNTSKIDPRTGFIDFLHPAYENIEKAKQWINKFDSIRFNSKMDWFEFTADT
RKFSENLMLGKNRVWVICTTNVERYFTSKTANSSIQYNSIQITEKLKELFVDIPFSNGQDL
KPEILRKNDAVFFKSLLFYIKTTLSLRQNNGKKGEEEKDFILSPVVDSKGRFFNSLEASDD
EPKDADANGAYHIALKGLMNLLVLNETKEENLSRPKWKIKNKDWLEFVWERNRKRPAA
TKKAGQAKKKKGSYPYDVPDYAYPYDVPDYAYPYDVPDYA
14-Lachnospiraceae bacterium ND2006 (LbCpf1)
(SEQ ID NO: 242)
MSKLEKFTNCYSLSKTLRFKAIPVGKTQENIDNKRLLVEDEKRAEDYKGVKK
LLDRYYLSFINDVLHSIKLKNLNNYISLFRKKTRTEKENKELENLEINLRKEIAKAFKGNE
GYKSLFKKDIIETILPEFLDDKDEIALVNSFNGFTTAFTGFFDNRENMFSEEAKSTSIAFRCI
NENLTRYISNMDIFEKVDAIFDKHEVQEIKEKILNSDYDVEDFFEGEFFNFVLTQEGIDVY
NAIIGGFVTESGEKIKGLNEYINLYNQKTKQKLPKFKPLYKQVLSDRESLSFYGEGYTSDE
EVLEVFRNTLNKNSEIFSSIKKLEKLFKNFDEYSSAGIFVKNGPAISTISKDIFGEWNVIRDK
WNAEYDDIHLKKKAVVTEKYEDDRRKSFKKIGSFSLEQLQEYADADLSVVEKLKEIIIQK
VDEIYKVYGSSEKLFDADFVLEKSLKKNDAVVAIMKDLLDSVKSFENYIKAFFGEGKET
NRDESFYGDFVLAYDILLKVDHIYDAIRNYVTQKPYSKDKFKLYFQNPQFMGGWDKDK
ETDYRATILRYGSKYYLAIMDKKYAKCLQKIDKDDVNGNYEKINYKLLPGPNKMLPKV
FFSKKWMAYYNPSEDIQKIYKNGTFKKGDMFNLNDCHKLIDFFKDSISRYPKWSNAYDF
NFSETEKYKDIAGFYREVEEQGYKVSFESASKKEVDKLVEEGKLYMFQIYNKDFSDKSH
GTPNLHTMYFKLLFDENNHGQIRLSGGAELFMRRASLKKEELVVHPANSPIANKNPDNP
KKTTTLSYDVYKDKRFSEDQYELHIPIANINKCPKNIFKINTEVRVLLKHDDNPYVIGIDRG
ERNLLYIVVVDGKGNIVEQYSLNEIINNFNGIRIKTDYHSLLDKKEKERFEARQNWTSIEN
IKELKAGYISQVVHKICELVEKYDAVIALEDLNSGFKNSRVKVEKQVYQKFEKMLIDKL
NYMVDKKSNPCATGGALKGYQITNKFESFKSMSTQNGFIFYIPAWLTSKIDPSTGFVNLL
KTKYTSIADKKFISSFDRIMYVPEEDLFEFALDYKNFSRTDADYIKKWKLYSYGNRIRIF
RNPKKNNVFDWEEVCLTSAYKELFNKYGINYQQGDIRALLCEQSDKAFYSSFMALMSL
MLQMRNSITGRTDVDFLISPVKNSDGIFYDSRNYEAQENAILPKNADANGAYNIARKVL
WAIGQFKKAEDEKLDKVKIASNKEWLEYAQTSVKHKRPAATKKAGQAKKKKGSYPYDV
PDYAYPYDVPDYAYPYDVPDYA

[chemical structure]

(SEQ ID NO: 243)
MDSLKDFTNLYPVSKTLRFELKPVGKTLENIEKAGILKEDEHRAESYRRVKKI
IDTYHKVFIDSSLENMAKMGIENEIKAMLQSFCELYKKDHRTEGEDKALDKIRAVLRGLI
VGAFTGVCGRRENTVQNEKYESLFKEKLIKEILPDFVLSTEAESLPFSVEEATRSLKEFDSF
TSYFAGFYENRKNIYSTKPQSTAIAYRLIHENLPKFIDNILVFQKIKEPIAKELEHIRADFSA
GGYIKKDERLEDIFSLNYYIHVLSQAGIEKYNALIGKIVTEGDGEMKGLNEHINLYNQQR
GREDRLPLFRPLYKQILSDREQLSYLPESFEKDEELLRALKEFYDHIAEDILGRTQQLMTSI
SEYDLSRIYVRNDSQLTDISKKMLGDWNAIYMARERAYDHEQAPKRITAKYERDRIKAL
KGEESISLANLNSCIAFLDNVRDCRVDTYLSTLGQKEGPHGLSNLVENVFASYHEAEQLL
SFPYPEENNLIQDKDNVVLIKNLLDNISDLQRFLKPLWGMGDEPDKDERFYGEYNYIRGA
LDQVIPLYNKVRNYLTRKPYSTRKVKLNFGNSQLLSGWDRNKEKDNSCVILRKGQNFYL
AIMNNRHKRSFENKMLPEYKEGEPYFEKMDYKFLPDPNKMLPKVFLSKKGIEIYKPSPKL
LEQYGHGTHKKGDTFSMDDLHELIDFFKHSIEAHEDWKQFGFKFSDTATYENVSSFYRE
VEDQGYKLSFRKVSESYVYSLIDQGKLYLFQIYNKDFSPCSKGTPNLHTLYWRMLFDER
NLADVIYKLDGKAEIFFREKSLKNDHPTHPAGKPIKKKSRQKKGEESLFEYDLVKDRRYT
MDKFQFHVPITMNFKCSAGSKVNDMVNAHIREAKDMHVIGIDRGERNLLYICVIDSRGTI
LDQISLNTINDIDYHDLLESRDKDRQQEHRNWQTIEGIKELKQGYLSQAVHRIAELMVAY
KAVVALEDLNMGFKRGRQKVESSVYQQFEKQLIDKLNYLVDKKKRPEDIGGLLRAYQF
TAPFKSFKEMGKQNGFLFYIPAWNTSNIDPTTGFVNLFHVQYENVDKAKSFFQKFDSISY
NPKKDWFEFAFDYKNFTKKAEGSRSMWILCTHGSRIKNFRNSQKNGQWDSEEFALTEAF
KSLFVRYEIDYTADLKTAIVDEKQKDFFVDLLKLFKLTVQMRNSWKEKDLDYLISPVAG
ADGRFFDTREGNKSLPKDADANGAYNIALKGLWALRQIRQTSEGGKLKLAISNKEWLQF
VQERSYEKDKRPAATKKAGQAKKKKGSYPYDVPDYAYPYDVPDYAYPYDVPDYA

[chemical structure]

(SEQ ID NO: 244)
MENYQEFTNLFQLNKTLRFELKPIGKTCELLEEGKIFASGSFLEKDKVR
ADNVSYVKKEIDKKHKIFIEETLSSFSISNDLLKQYFDCYNELKAFKKDCKSDEEE
VKKTALRNKCTSIQRAMREAISQAFLKSPQKKLLAIKNLIENVFKADENVQHFSE
FTSYFSGFETNRENFYSDEEKSTSIAYRLVHDNLPIFIKNIYIFEKLKEQFDAKTLSE
IFENYKLYVAGSSLDEVFSLEYFNNTLTQKGIDNYNAVIGKIVKEDKQEIQGLNE
HINLYNQKHKDRRLPFFISLKKQILSDREALSWLPDMFKNDSEVIDALKGFYIEDG
FENNVLTPLATLLSSLDKYNLNGIFIRNNEALSSLSQNVYRNFSIDEAIDAQNAELQ
TFNNYELIANALRAKIKKETKQGRKSFEKYEEYIDKKVKAIDSLSIQEINELVENY
VSEFNSNSGNMPRKVEDYFSLMRKGDFGSNDLIENIKTKLSAAEKLLGTKYQET
AKDIFKKDENSKLIKELLDATKQFQHFIKPLLGTGEEADRDLVFYGDFLPLYEKFE
ELTLLYNKVRNRLTQKPYSKDKIRLCFNKPKLMTGWVDSKTEKSDNGTQYGGY
LFRKKNEIGEYDYFLGISSKAQLFRKNEAVIGDYERLDYYQPKANTIYGSAYEGE
NSYKEDKKRLNKVIIAYIEQIKQTNIKKSIIESISKYPNISDDDKVTPSSLLEKIKKVS
IDSYNGILSFKSFQSVNKEVIDNLLKTISPLKNKAEFLDLINKDYQIFTEVQAVIDEI
CKQKTFIYFPISNVELEKEMGDKDKPLCLFQISNKDLSFAKTFSANLRKKRGAEN
LHTMLFKALMEGNQDNLDLGSGAIFYRAKSLDGNKPTHPANEAIKCRNVANKD
KVSLFTYDIYKNRRYMENKFLFHLSIVQNYKAANDSAQLNSSATEYIRKADDLHI
IGIDRGERNLLYYSVIDMKGNIVEQDSLNIIRNNDLETDYHDLLDKREKERKANR
QNWEAVEGIKDLKKGYLSQAVHQIAQLMLKYNAIIALEDLGQMFVTRGQKIEKA
VYQQFEKSLVDKLSYLVDKKRPYNELGGILKAYQLASSITKNNSDKQNGFLFYV
PAWNTSKIDPVTGFTDLLRPKAMTIKEAQDFFGAFDNISYNDKGYFEFETNYDKF
KIRMKSAQTRWTICTFGNRIKRKKDKNYWNYEEVELTEEFKKLFKDSNIDYENC
NLKEEIQNKDNRKFFDDLIKLLQLTLQMRNSDDKGNDYIISPVANAEGQFFDSRN
GDKKLPLDADANGAYNIARKGLWNIRQIKQTKNKDDLNLSISSTEWLDFVREKP
YLKKRPAATKKAGQAKKKKGSYPYDVPDYAYPYDVPDYAYPYDVPDYA

[chemical structure]

(SEQ ID NO: 245)
MKTQHFFEDFTSLYSLSKTIRFELKPIGKTLENIKKNGLIRRDEQRLDDYEKLK
KVIDEYHEDFIANILSSFSFSEEILQSYIQNLSISEARAKIEKTMRDTLAKAFSEDERYKSIF
KKELVKKDIPVWCPAYKSLCKKFDNFTTSLVPFHENRKNLYTSNEITASIPYRIVHVNLPK
FIQNIEALCELQKKMGADLYLEMMENLRNVWPSFVKTPDDLCNLKTYNHLMVQSSISEY
NRFVGGYSTEDGTKHQGINEWINIYRQRNKEMRLPGLVFLHKQILAKVDSSSFISDTLEN
DDQVFCVLRQFRKLFWNTVSSKEDDAASLKDLFCGLSGYDPEAIYVSDAHLATISKNIFD
RWNYISDAIRRKTEVLMPRKKESVERYAEKISKQIKKRQSYSLAELDDLLAHYSEESLPA
GFSLLSYFTSLGGQKYLVSDGEVILYEEGSNIWDEVLIAFRDLQVILDKDFTEKKLGKDEE
AVSVIKKALDSALRLRKFFDLLSGTGAEIRRDSSFYALYTDRMDKLKGLLKMYDKVRNY
LTKKPYSIEKFKLHFDNPSLLSGWDKNKELNNLSVIFRQNGYYYLGIMTPKGKNLFKTLP
KLGAEEMFYEKMEYKQIAEPMLMLPKVFFPKKTKPAFAPDQSVVDIYNKKTFKTGQKG
FNKKDLYRLIDFYKEALTVHEWKLFNFSFSPTEQYRNIGEFFDEVREQAYKVSMVNVPA
SYIDEAVENGKLYLFQIYNKDFSPYSKGIPNLHTLYWKALFSEQNQSRVYKLCGGGELFY
RKASLHMQDTTVHPKGISIHKKNLNKKGETSLFNYDLVKDKRFTEDKFFFHVPISINYKN
KKITNVNQMVRDYIAQNDDLQHGIDRGERNLLYISRIDTRGNLLEQFSLNVIESDKGDLR
TDYQKILGDREQERLRRRQEWKSIESIKDLKDGYMSQVVHKICNMVVEHKAIVVLENLN
LSFMKGRKKVEKSVYEKFERMLVDKLNYLVVDKKNLSNEPGGLYAAYQLTNPLFSFEE
LHRYPQSGILFFVDPWNTSLTDPSTGFVNLLGRINYTNVGDARKFFDRFNAIRYDGKGNI
LFDLDLSRFDVRVETQRKLWTLTTFGSRIAKSKKSGKWMVERIENLSLCFLELFEQFNIG
YRVEKDLKKAILSQDRKEFYVRLIYLFNLMMQIRNSDGEEDYILSPALNEKNLQFDSRLIE
AKDLPVDADANGAYNVARKGLMVVQRIKRGDHESIHRIGRAQWLRYVQEGIVEKRPAA
TKKAGQAKKKKGSYPYDVPDYAYPYDVPDYAYPYDVPDYA

### Example 15

### Computational Analysis of the Cpf1 Structure

[1712] Computational analysis of the primary structure of Cpf1 nucleases reveals three distinct regions (FIG. 109). First a C-terminal RuvC like domain, which is the only functional characterized domain. Second a N-terminal alpha-helical region and thirst a mixed alpha and beta region, located between the RuvC like domain and the alpha-helical region.

[1713] Several small stretches of unstructured regions are predicted within the Cpf1 primary structure. Unstructured regions, which are exposed to the solvent and not conserved within different Cpf1 orthologs, are preferred sides for splits and insertions of small protein sequences. In addition, these sides can be used to generate chimeric proteins between Cpf1 orthologs.

### Example 16

### Generation of Cpf1 Mutants with Enhanced Specificity

[1714] Recently a method was described for the generation of Cas9 orthologs with enhanced specificity (Slaymaker et al. 2015). This strategy can be used to enhance the specificity of Cpf1 orthologs.

[1715] Primary residues for mutagenesis are all positive charges residues within the RuvC domain, since this is the only known structure in the absence of a crystal and we know that specificity mutants in RuvC worked in Cas9 (see Table below: Conserved Lysine and Arginine residues within RuvC).

TABLE
Conserved Lysine and Arginine residues within RuvC.

| AsCpf1 | LbCpf1 |
|---|---|
| R912 | R833 |
| T923 | R836 |
| R947 | K847 |
| K949 | K879 |
| R951 | K881 |
| R955 | R883 |
| K965 | R887 |
| K968 | K897 |
| K1000 | K900 |
| R1003 | K932 |
| K1009 | R935 |
| K1017 | K940 |
| K1022 | K948 |
| K1029 | K953 |
| K1072 | K960 |
| K1086 | K984 |
| F1103 | K1003 |
| R1226 | K1017 |
| R1252 | R1033 |
| | R1138 |
| | R1165 |

Additional candidates are positive charged residues that are conserved between different orthologs are provided in the Table below.

TABLE
Conserved Lysine and Arginine residues

| Residue | AsCpf1 | FnCpf1 | LbCpf1 | MbCpf1 |
|---|---|---|---|---|
| Lys | K15 | K15 | K15 | K14 |
| Arg | R18 | R18 | R18 | R17 |
| Lys/Arg | K26 | K26 | K26 | R25 |
| Lys/Arg | Q34 | R34 | K34 | K33 |
| Arg | R43 | R43 | R43 | M42 |
| Lys | K48 | K48 | K48 | Q47 |
| Lys | K51 | K51 | K51 | K50 |
| Lys/Arg | R56 | K56 | R56 | D55 |
| Lys/Arg | R84 | K87 | K83 | K85 |
| Lys/Arg | K85 | K88 | K84 | N86 |
| Lys/Arg | K87 | D90 | R86 | K88 |
| Arg | N93 | K96 | K92 | K94 |
| Lys/Arg | R103 | K106 | R102 | R104 |
| Lys | N104 | K107 | K103 | K105 |
| Lys | T118 | K120 | K116 | K118 |
| Lys/Arg | K123 | Q125 | K121 | K123 |
| Lys | K134 | K143 | — | K131 |
| Arg | R176 | R186 | R158 | R174 |
| Lys | K177 | K187 | E159 | K175 |
| Arg | R192 | R202 | R174 | R190 |
| Lys/Arg | K200 | K210 | R182 | R198 |
| Lys | K226 | K235 | K206 | I221 |
| Lys | K273 | K296 | K251 | K267 |
| Lys | K275 | K298 | K253 | Q269 |
| Lys | T291 | K314 | K269 | K285 |
| Lys/Arg | R301 | K320 | K271 | K291 |
| Lys | K307 | K326 | K278 | K297 |
| Lys | K369 | K397 | P342 | K357 |
| Lys | S404 | K444 | K380 | K403 |
| Lys/Arg | V409 | K449 | R385 | K409 |
| Lys | K414 | E454 | K390 | K414 |
| Lys | K436 | A483 | K415 | K448 |
| Lys | K438 | E491 | K421 | K460 |
| Lys | K468 | K527 | K457 | K501 |
| Lys | D482 | K541 | K471 | K515 |
| Lys | K516 | K581 | A506 | K550 |
| Arg | R518 | R583 | R508 | R552 |
| Lys | K524 | K589 | K514 | K558 |
| Lys | K530 | K595 | K520 | K564 |
| Lys | K532 | K597 | K522 | K566 |
| Lys | K548 | K613 | K538 | K582 |
| Lys | K559 | K624 | Y548 | K593 |
| Lys | K570 | K635 | K560 | K604 |
| Lys/Arg | R574 | K639 | K564 | K608 |
| Lys | K592 | K656 | K580 | K623 |
| Lys | D596 | K660 | K584 | K627 |
| Lys | K603 | K667 | K591 | K633 |
| Lys | K607 | K671 | K595 | K637 |
| Lys | K613 | K677 | K601 | E643 |
| Lys | C647 | K719 | K634 | K780 |
| Lys/Arg | R681 | K725 | K640 | Y787 |
| Lys/Arg | K686 | K730 | R645 | K792 |
| Lys | H720 | K763 | K679 | K830 |
| Lys | K739 | K782 | K689 | Q846 |
| Lys | K748 | K791 | K707 | K858 |
| Lys/Arg | K757 | R800 | T716 | K867 |
| Lys/Arg | T766 | K809 | K725 | K876 |
| Lys/Arg | K780 | K823 | R737 | K890 |
| Arg | R790 | R833 | R747 | R900 |
| Lys/Arg | P791 | K834 | R748 | K901 |
| Lys | K796 | K839 | K753 | M906 |
| Lys | K809 | K852 | K768 | K921 |
| Lys | K815 | K858 | K774 | K927 |
| Lys | T816 | K859 | K775 | K928 |
| Lys | K860 | K869 | K785 | K937 |
| Lys/Arg | R862 | K871 | K787 | K939 |
| Arg | R863 | R872 | R788 | R940 |
| Lys | K868 | K877 | Q793 | K945 |
| Lys | K897 | K905 | K821 | Q975 |
| Arg | R909 | R918 | R833 | R987 |
| Arg | R912 | R921 | R836 | R990 |
| Lys | T923 | K932 | K847 | K1001 |
| Lys/Arg | R947 | I960 | K879 | R1034 |
| Lys | K949 | K962 | K881 | I1036 |
| Arg | R951 | R964 | R883 | R1038 |
| Arg | R955 | R968 | R887 | R1042 |
| Lys | K965 | K978 | K897 | K1052 |
| Lys | K968 | K981 | K900 | K1055 |
| Lys | K1000 | K1013 | K932 | K1087 |
| Arg | R1003 | R1016 | R935 | R1090 |
| Lys | K1009 | K1021 | K940 | K1095 |
| Lys | K1017 | K1029 | K948 | N1103 |
| Lys | K1022 | K1034 | K953 | K1108 |
| Lys | K1029 | K1041 | K960 | K1115 |
| Lys | A1053 | K1065 | K984 | K1139 |
| Lys | K1072 | K1084 | K1003 | K1158 |
| Lys/Arg | K1086 | K1098 | K1017 | R1172 |
| Lys/Arg | F1103 | K1114 | R1033 | K1188 |
| Lys | S1209 | K1201 | K1121 | K1276 |
| Arg | R1226 | R1218 | R1138 | R1293 |
| Arg | R1252 | R1244 | R1165 | A1319 |
| Lys | K1273 | K1265 | K1190 | K1340 |
| Lys | K1282 | K1274 | K1199 | K1349 |
| Lys | K1288 | K1281 | K1208 | K1356 |

[1716] The Table above provides the positions of conserved Lysine and Arginine residues in an alignment of Cpf1 nuclease from Francisella novicida U112 (FnCpf1), Acidaminococcus sp. BV3L6 (AsCpf1), Lachnospiraceae bacterium ND2006 (LbCpf1) and Moraxella bovoculi 237 (MbCpf1). These can be used to generate Cpf1 mutants with enhanced specificity.

### Example 17

### Improving Specificity of Cpf1 Binding

[1717] With a similar strategy used to improve Cas9 specificity, specificity of Cpf1 can be improved by mutating residues that stabilize the non-targeted DNA strand. This may be accomplished without a crystal structure by using linear structure alignments to predict 1) which domain of Cpf1 binds to which strand of DNA and 2) which residues within these domains contact DNA.

[1718] However, this approach may be limited due to poor conservation of Cpf1 with known proteins. Thus it may be desirable to probe the function of all likely DNA interacting amino acids (lysine, histidine and arginine).

[1719] Positively charged residues in the RuvC domain are more conserved throughout Cpf1s than those in the Rad50 domain indicating that RuvC residues are less evolutionarily flexible. This suggests that rigid control of nucleic acid binding is needed in this domain (relative to the Rad50 domain). Therefore, it is possible this domain cuts the targeted DNA strand because of the requirement for RNA:DNA duplex stabilization (precedent in Cas9). Furthermore, more arginines are present in the RuvC domain (5% of RuvC residues 904 to 1307 vs 3.8% in the proposed Rad50 domains) suggesting again that RuvC targets one of the DNA strands. Arginines are more involved in binding nucleic acid major and minor grooves (Rohs Nature 2009: http://rohslab.cmb.usc.edu/Papers/Rohs_etal_Nature.pdf). Major/minor grooves would only be present in a duplex (such as DNA:RNA targeting duplex), further suggesting that RuvC may be involved in cutting.

[1720] FIGS. 110, 111 and 112 and provide crystal structures of two similar domains as those found in Cpf1 (RuvC holiday junction resolvase and Rad50 DNA repair protein). Based on these structures, it can be deduced what the relevant domains look like in Cpf1, and infer which regions and residues may contact DNA. In each structure residues are highlighted that contact DNA. In the alignments in FIG. 113 the regions of AsCpf1 that correspond to these DNA binding regions are annotated. The list of residues in Table below are those found in the two binding domains.

TABLE
list of probable DNA interacting residues

| RuvC domain | Rad50 domain |
|---|---|
| probable DNA | probable DNA |
| interacting residues: | interacting residues: |
| AsCpf1 | AsCpf1 |
| R909 | K324 |
| R912 | K335 |
| R930 | K337 |
| R947 | R331 |
| K949 | K369 |
| R951 | K370 |
| R955 | R386 |
| K965 | R392 |
| K968 | R393 |
| K1000 | K400 |
| K1002 | K404 |
| R1003 | K406 |
| K1009 | K408 |
| K1017 | K414 |
| K1022 | K429 |
| K1029 | K436 |
| K1035 | K438 |
| K1054 | K459 |
| K1072 | K460 |
| K1086 | K464 |
| R1094 | R670 |
| K1095 | K675 |
| K1109 | R681 |
| K1118 | K686 |
| K1142 | K689 |
| K1150 | R699 |
| K1158 | K705 |
| K1159 | R725 |
| R1220 | K729 |
| R1226 | K739 |
| R1242 | K748 |
| R1252 | K752 |
| | R670 |

[1721] From these specific observations about AsCpf1 we can identify similar residues in Cpf1 from other species by sequence alignments. Example given in FIG. 114 of AsCpf1 and FnCpf1 aligned, identifying Rad50 binding domains and the Arginines and Lysines within.

### Example 18

### Multiplexing with Cpf1 Using Tandem Guides

[1722] It was considered whether multiplexing is possible with the Cpf1 enzyme. For this purpose, guide RNAs were developed whereby different guide sequences were positioned in tandem under the same promoter, and the ability of these guides to direct genome editing to their respective targets was determined.

[1723] 150,000 HEK293T cells were plated per 24-well 24 h before transfection. Cells were transfected with 400 ng huAsCpf1 plasmid and 100 ng of tandem guide plasmid comprising one guide sequence directed to GRIN28 and one directed to EMX1 placed in tandem behind the U6 promoter (FIG. 115A), using Lipofectamin2000. Cells were harvested 72 h after transfection and AsCpf1 activity mediated by tandem guides was assayed using the SURVEYOR nuclease assay.

[1724] The results are demonstrated in FIG. 115B, which demonstrates INDEL formation in both the GRIN28 and the EMX1 gene.

[1725] It was thus determined that AsCpf1 and by analogy LbCpf1 can employ two guides expressed from the same U6 promoter without loss in activity. The position within the tandem has no influence on the indel formation. This demonstrated that Cpf1 can be used for multiplexing using two or more guides.

[1726] The invention is further described by the following numbered paragraphs:
[1727] 1. An engineered, non-naturally occurring Clustered Regularly Interspersed Short Palindromic Repeat (CRISPR)-CRISPR associated (Cas) (CRISPR-Cas) system comprising
   [1728] a) one or more Type V CRISPR-Cas polynucleotide sequences comprising a guide RNA which comprises a guide sequence linked to a direct repeat sequence, wherein the guide sequence is capable of hybridizing with a target sequence, or one or more nucleotide sequences encoding the one or more Type V CRISPR-Cas polynucleotide sequences, and
   [1729] b) a Cpf1 effector protein, or one or more nucleotide sequences encoding the Cpf1 effector protein;
   [1730] wherein the one or more guide sequences hybridize to said target sequence, said target sequence is 3′ of a Protospacer Adjacent Motif (PAM), and said guide RNA forms a complex with the Cpf1 effector protein.
[1731] 2. An engineered, non-naturally occurring Clustered Regularly Interspersed Short Palindromic Repeat (CRISPR)-CRISPR associated (Cas) (CRISPR-Cas) vector system comprising one or more vectors comprising
   [1732] c) a first regulatory element operably linked to one or more nucleotide sequences encoding one or more Type V CRISPR-Cas polynucleotide sequences comprising a guide RNA which comprises a guide sequence linked to a direct repeat sequence, wherein the guide sequence is capable of hybridizing with a target sequence,
   [1733] d) a second regulatory element operably linked to a nucleotide sequence encoding a Cpf1 effector protein;
   [1734] wherein components (a) and (b) are located on the same or different vectors of the system,
   [1735] wherein when transcribed, the one or more guide sequences hybridize to said target sequence, said target sequence is 3′ of a Protospacer Adjacent Motif (PAM), and said guide RNA forms a complex with the Cpf1 effector protein.
[1736] 3. The system of paragraph 1 or 2 wherein the target sequences is within a cell.
[1737] 4. The system of paragraph 3 wherein the cell comprises a eukaryotic cell.
[1738] 5. The system according to any one of paragraphs 1-4, wherein when transcribed the one or more guide sequences hybridize to the target sequence and the guide RNA forms a complex with the Cpf1 effector protein which causes cleavage distally of the target sequence.
[1739] 6. The system according to paragraph 5, wherein said cleavage generates a staggered double stranded break with a 4 or 5-nt 5′ overhang.
[1740] 7. The system according to any one of paragraphs 1-6, wherein the PAM comprises a 5′ T-rich motif
[1741] 8. The system according to any one of paragraphs 1-7, wherein the effector protein is a Cpf1 effector protein derived from a bacterial species listed in FIG. 64.
[1742] 9. The system according to paragraph 8, wherein the Cpf1 effector protein is derived from a bacterial species selected from the group consisting of Francisella tularensis 1, Francisella tularensis subsp. novicida, Prevotella albensis, Lachnospiraceae bacterium MC2017 1, Butyrivibrio proteoclasticus, Peregrinibacteria bacterium GW2011_GWA2_33_10, Parcubacteria bacterium GW2011_GWC2_44_17, Smithella sp. SCADC, Acidaminococcus sp. BV3L6, Lachnospiraceae bacterium MA2020, Candidatus Methanoplasma termitum, Eubacterium eligens, Moraxella bovoculi 237, Leptospira inadai, Lachnospiraceae bacterium ND2006, Porphyromonas crevioricanis 3, Prevotella disiens and Porphyromonas macacae.
[1743] 10. The system according to paragraph 9, wherein the PAM sequence is TTN, where N is A/C/G or T and the effector protein is FnCpf1 or wherein the PAM sequence is TTTV, where V is A/C or G and the effector protein is PaCpf1p, LbCpf1 or AsCpf1.
[1744] 11. The system of any one of paragraphs 1-10, wherein the Cpf1 effector protein comprises one or more nuclear localization signals.
[1745] 12. The system of any one of paragraphs 1-11, wherein the nucleic acid sequences encoding the Cpf1 effector protein is codon optimized for expression in a eukaryotic cell.
[1746] 13. The system of any one of paragraphs 1-12 wherein components (a) and (b) or the nucleotide sequences are on one vector.
[1747] 14. A method of modifying a target locus of interest comprising delivering a system of any one of paragraphs 1-13, to said locus or a cell containing the locus.
[1748] 15. A method of modifying a target locus of interest, the method comprising delivering to said locus a non-naturally occurring or engineered composition comprising a Cpf1 effector protein and one or more nucleic acid components, wherein the Cpf1 effector protein forms a complex with the one or more nucleic acid components and upon binding of the said complex to a target locus of interest that is 3′ of a Protospacer Adjacent Motif (PAM), the effector protein induces a modification of the target locus of interest, wherein the complex comprises Mg²⁺.
[1749] 16. The method of paragraph 14 or 15, wherein the target locus of interest is within a cell.
[1750] 17. The method of paragraph 16, wherein the cell is a eukaryotic cell.
[1751] 18. The method of paragraph 16, wherein the cell is an animal or human cell.
[1752] 19. The method of paragraph 16, wherein the cell is a plant cell.
[1753] 20. The method of paragraph 14 or 15, wherein the target locus of interest is comprised in a DNA molecule in vitro.
[1754] 21. The method of any one of paragraphs 15-20, wherein said non-naturally occurring or engineered composition comprising a Cpf1 effector protein and one or more nucleic acid components is delivered to the cell as one or more polynucleotide molecules.
[1755] 22. The method of any one of paragraphs 14-21, wherein the target locus of interest comprises DNA.
[1756] 23. The method of paragraph 22, wherein the DNA is relaxed or supercoiled.
[1757] 24. The method of any one of paragraphs 14-23, wherein the composition comprises a single nucleic acid component.
[1758] 25. The method of paragraph 24, wherein the single nucleic acid component comprises a guide sequence linked to a direct repeat sequence.
[1759] 26. The method of any one of paragraphs 14-25 wherein the modification of the target locus of interest is a strand break.
[1760] 27. The method of paragraph 26, wherein the strand break comprises a staggered DNA double stranded break with a 4 or 5-nt 5′ overhang.
[1761] 28. The method of paragraph 26 or 27, wherein the target locus of interest is modified by the integration of a DNA insert into the staggered DNA double stranded break.
[1762] 29. The method of any one of paragraphs 14-28, wherein the Cpf1 effector protein comprises one or more nuclear localization signal(s) (NLS(s)).
[1763] 30. The method of any one of paragraphs 21-29, wherein the one or more polynucleotide molecules are comprised within one or more vectors.
[1764] 31. The method of any one of paragraphs 21-30, wherein the one or more polynucleotide molecules comprise one or more regulatory elements operably configured to express the Cpf1 effector protein and/or the nucleic acid component(s), optionally wherein the one or more regulatory elements comprise inducible promoters.
[1765] 32. The method of any one of paragraphs 21 to 31 wherein the one or more polynucleotide molecules or the one or more vectors are comprised in a delivery system.
[1766] 33. The method of any one of paragraphs 14-30, wherein system or the one or more polynucleotide molecules are delivered via particles, vesicles, or one or more viral vectors.
[1767] 34. The method of paragraph 33 wherein the particles comprise a lipid, a sugar, a metal or a protein.
[1768] 35. The method of paragraph 33 wherein the vesicles comprise exosomes or liposomes.
[1769] 36. The method of paragraph 33 wherein the one or more viral vectors comprise one or more of adenovirus, one or more lentivirus or one or more adeno-associated virus.
[1770] 37. The method of any one of paragraphs 14-36, which is a method of modifying a cell, a cell line or an organism by manipulation of one or more target sequences at genomic loci of interest.
[1771] 38. A cell from the method of paragraph 37, or progeny thereof, wherein the cell comprises a modification not present in a cell not subjected to the method.
[1772] 39. The cell of paragraph 38, of progeny thereof, wherein the cell not subjected to the method comprises an abnormality and the cell from the method has the abnormality addressed or corrected.
[1773] 40. A cell product from the cell or progeny thereof of paragraph 38, wherein the product is modified in nature or quantity with respect to a cell product from a cell not subjected to the method.
[1774] 41. The cell product of paragraph 40, wherein the cell not subjected to the method comprises an abnormality and the cell product reflects the abnormality having been addressed or corrected by the method.
[1775] 42. An in vitro, ex vivo or in vivo host cell or cell line or progeny thereof comprising a system of any one of paragraphs 1-13.
[1776] 43. The host cell or cell line or progeny thereof according to paragraph 42, wherein the cell is a eukaryotic cell.
[1777] 44. The host cell or cell line or progeny thereof according to paragraph 43, wherein the cell is an animal cell.
[1778] 45. The host cell or cell line or progeny thereof of paragraph 33, wherein the cell is a human cell.
[1779] 46. The host cell, cell line or progeny thereof according to paragraph 31 comprising a stem cell or stem cell line.
[1780] 47. The host cell or cell line or progeny thereof according to paragraph 30, wherein the cell is a plant cell.
[1781] 48. A method of producing a plant, having a modified trait of interest encoded by a gene of interest, said method comprising contacting a plant cell with a system according to any one of paragraphs 1-13 or subjecting the plant cell to a method according to paragraph 14-17 or 19 to 37, thereby either modifying or introducing said gene of interest, and regenerating a plant from said plant cell.
[1782] 49. A method of identifying a trait of interest in a plant, said trait of interest encoded by a gene of interest, said method comprising contacting a plant cell with a system according to any one of paragraphs 1-13 or subjecting the plant cell to a method according to paragraph 14-17 or 19 to 37, thereby identifying said gene of interest.
[1783] 50. The method of paragraphs 49, further comprising introducing the identified gene of interest into a plant cell or plant cell line or plant germplasm and generating a plant therefrom, whereby the plant contains the gene of interest.
[1784] 51. The method of paragraph 50 wherein the plant exhibits the trait of interest.
[1785] 52. A particle comprising a system according to any one of paragraphs 1-13.
[1786] 53. The particle of paragraph 52, wherein the particle contains the Cpf1 effector protein complexed with the guide RNA.
[1787] 54. The system or method of any preceding paragraph, wherein the complex, guide RNA or protein is conjugated to at least one sugar moiety, optionally N-acetyl galactosamine (GalNAc), in particular triantennary GalNAc.
[1788] 55. The system or method of any preceding paragraph, wherein the concentration of Mg²⁺ is about 1 mM to about 15 mM.

[1789] While preferred embodiments of the present invention have been shown and described herein, it will be obvious to those skilled in the art that such embodiments are provided by way of example only. Numerous variations, changes, and substitutions will now occur to those skilled in the art without departing from the invention. It should be understood that various alternatives to the embodiments of the invention described herein may be employed in practicing the invention. It is intended that the following claims define the scope of the invention and that methods and structures within the scope of these claims and their equivalents be covered thereby.

What is claimed:

1. An engineered, non-naturally occurring Clustered Regularly Interspersed Short Palindromic Repeat (CRISPR)-CRISPR associated (Cas) (CRISPR-Cas) system comprising
e) one or more Type V CRISPR-Cas polynucleotide sequences comprising a guide RNA which comprises a guide sequence linked to a direct repeat sequence, wherein the guide sequence is capable of hybridizing with a target sequence, or one or more nucleotide sequences encoding the one or more Type V CRISPR-Cas polynucleotide sequences, and
f) a Cpf1 effector protein, or one or more nucleotide sequences encoding the Cpf1 effector protein;
wherein the one or more guide sequences hybridize to said target sequence, said target sequence is 3′ of a Protospacer Adjacent Motif (PAM), and said guide RNA forms a complex with the Cpf1 effector protein,
wherein the system comprises Mg²⁺.

2. An engineered, non-naturally occurring Clustered Regularly Interspersed Short Palindromic Repeat (CRISPR)-CRISPR associated (Cas) (CRISPR-Cas) vector system comprising one or more vectors comprising
g) a first regulatory element operably linked to one or more nucleotide sequences encoding one or more Type V CRISPR-Cas polynucleotide sequences comprising a guide RNA which comprises a guide sequence linked to a direct repeat sequence, wherein the guide sequence is capable of hybridizing with a target sequence,
h) a second regulatory element operably linked to a nucleotide sequence encoding a Cpf1 effector protein;
wherein components (a) and (b) are located on the same or different vectors of the system,
wherein when transcribed, the one or more guide sequences hybridize to said target sequence, said target sequence is 3′ of a Protospacer Adjacent Motif (PAM), and said guide RNA forms a complex with the Cpf1 effector protein,
wherein the system comprises Mg²⁺.

3. The system of claim 1 or 2 wherein the target sequences is within a cell.

4. The system of claim 3 wherein the cell comprises a eukaryotic cell.

5. The system according to claim 1 or 2, wherein when transcribed the one or more guide sequences hybridize to the target sequence and the guide RNA forms a complex with the Cpf1 effector protein which causes cleavage distally of the target sequence.

6. The system according to claim 5, wherein said cleavage generates a staggered double stranded break with a 4 or 5-nt 5′ overhang.

7. The system according to claim 1 or 2, wherein the PAM comprises a 5′ T-rich motif.

8. The system according to claim 1 or 2, wherein the effector protein is a Cpf1 effector protein derived from a bacterial species listed in FIG. 64.

9. The system according to claim 8, wherein the Cpf1 effector protein is derived from a bacterial species selected from the group consisting of Francisella tularensis 1, Francisella tularensis subsp. novicida, Prevotella albensis, Lachnospiraceae bacterium MC2017 1, Butyrivibrio proteoclasticus, Peregrinibacteria bacterium GW2011_GWA2_33_10, Parcubacteria bacterium GW2011_GWC2_44_17, Smithella sp. SCADC, Acidaminococcus sp. BV3L6, Lachnospiraceae bacterium MA2020, Candidatus Methanoplasma termitum, Eubacterium eligens, Moraxella bovoculi 237, Leptospira inadai, Lachnospiraceae bacterium ND2006, Porphyromonas crevioricanis 3, Prevotella disiens and Porphyromonas macacae.

10. The system according to claim 9, wherein the PAM sequence is TTN, where N is A/C/G or T and the effector protein is FnCpf1 or wherein the PAM sequence is TTTV, where V is A/C or G and the effector protein is PaCpf1p, LbCpf1 or AsCpf1.

11. The system according to claim 1 or 2, wherein the Cpf1 effector protein comprises one or more nuclear localization signals.

12. The system according to claim 1 or 2, wherein the nucleic acid sequences encoding the Cpf1 effector protein is codon optimized for expression in a eukaryotic cell.

13. The system according to claim 1 or 2 wherein components (a) and (b) or the nucleotide sequences are on one vector.

14. A method of modifying a target locus of interest comprising delivering a system according to claim 1 or 2, to said locus or a cell containing the locus.

15. A method of modifying a target locus of interest, the method comprising delivering to said locus a non-naturally occurring or engineered composition comprising a Cpf1 effector protein and one or more nucleic acid components, wherein the Cpf1 effector protein forms a complex with the one or more nucleic acid components and upon binding of the said complex to a target locus of interest that is 3′ of a Protospacer Adjacent Motif (PAM), the effector protein induces a modification of the target locus of interest, wherein the complex comprises Mg²⁺.

16. The method of claim 15, wherein the target locus of interest is within a cell.

17. The method of claim 16, wherein the cell is a eukaryotic cell.

18. The method of claim 16, wherein the cell is an animal or human cell.

19. The method of claim 16, wherein the cell is a plant cell.

20. The method of claim 15, wherein the target locus of interest is comprised in a DNA molecule in vitro.

21. The method of claim 15, wherein said non-naturally occurring or engineered composition comprising a Cpf1 effector protein and one or more nucleic acid components is delivered to the cell as one or more polynucleotide molecules.

22. The method of claim 15, wherein the target locus of interest comprises DNA.

23. The method of claim 22, wherein the DNA is relaxed or supercoiled.

24. The method of claim 15, wherein the composition comprises a single nucleic acid component.

25. The method of claim 24, wherein the single nucleic acid component comprises a guide sequence linked to a direct repeat sequence.

26. The method of claim 15 wherein the modification of the target locus of interest is a strand break.

27. The method of claim 26, wherein the strand break comprises a staggered DNA double stranded break with a 4 or 5-nt 5′ overhang.

28. The method of claim 26, wherein the target locus of interest is modified by the integration of a DNA insert into the staggered DNA double stranded break.

29. The method of claim 15, wherein the Cpf1 effector protein comprises one or more nuclear localization signal(s) (NLS(s)).

30. The method of claim 21, wherein the one or more polynucleotide molecules are comprised within one or more vectors.

31. The method of claim 21, wherein the one or more polynucleotide molecules comprise one or more regulatory elements operably configured to express the Cpf1 effector protein and/or the nucleic acid component(s), optionally wherein the one or more regulatory elements comprise inducible promoters.

32. The method of claim 21 wherein the one or more polynucleotide molecules or the one or more vectors are comprised in a delivery system.

33. The method of claim 21, wherein system or the one or more polynucleotide molecules are delivered via particles, vesicles, or one or more viral vectors.

34. The method of claim 33 wherein the particles comprise a lipid, a sugar, a metal or a protein.

35. The method of claim 33 wherein the vesicles comprise exosomes or liposomes.

36. The method of claim 33 wherein the one or more viral vectors comprise one or more of adenovirus, one or more lentivirus or one or more adeno-associated virus.

37. The method of claim 15, which is a method of modifying a cell, a cell line or an organism by manipulation of one or more target sequences at genomic loci of interest.

38. A cell from the method of claim 37, or progeny thereof, wherein the cell comprises a modification not present in a cell not subjected to the method.

39. The cell of claim 38, of progeny thereof, wherein the cell not subjected to the method comprises an abnormality and the cell from the method has the abnormality addressed or corrected.

40. A cell product from the cell or progeny thereof of claim 38, wherein the product is modified in nature or quantity with respect to a cell product from a cell not subjected to the method.

41. The cell product of claim 40, wherein the cell not subjected to the method comprises an abnormality and the cell product reflects the abnormality having been addressed or corrected by the method.

42. An in vitro, ex vivo or in vivo host cell or cell line or progeny thereof comprising a system of claim 1 or 2.

43. The host cell or cell line or progeny thereof according to claim 42, wherein the cell is a eukaryotic cell.

44. The host cell or cell line or progeny thereof according to claim 43, wherein the cell is an animal cell.

45. The host cell or cell line or progeny thereof of claim 33, wherein the cell is a human cell.

46. The host cell, cell line or progeny thereof according to claim 31 comprising a stem cell or stem cell line.

47. The host cell or cell line or progeny thereof according to claim 30, wherein the cell is a plant cell.

48. A method of producing a plant, having a modified trait of interest encoded by a gene of interest, said method comprising contacting a plant cell with a system according to claim 1 or 2 or subjecting the plant cell to a method according to claim 15, thereby either modifying or introducing said gene of interest, and regenerating a plant from said plant cell.

49. A method of identifying a trait of interest in a plant, said trait of interest encoded by a gene of interest, said method comprising contacting a plant cell with a system according to claim 1 or 2 or subjecting the plant cell to a method according to claim 15, thereby identifying said gene of interest.

50. The method of claim 49, further comprising introducing the identified gene of interest into a plant cell or plant cell line or plant germplasm and generating a plant therefrom, whereby the plant contains the gene of interest.

51. The method of claim 50 wherein the plant exhibits the trait of interest.

52. A particle comprising a system according to claim 1 or 2.

53. The particle of claim 52, wherein the particle contains the Cpf1 effector protein complexed with the guide RNA.

54. The system or method of claim 1, 2 or 15, wherein the complex, guide RNA or protein is conjugated to at least one sugar moiety, optionally N-acetyl galactosamine (GalNAc), in particular triantennary GalNAc.

55. The system or method of claim 1, 2 or 15, wherein the concentration of Mg²⁺ is about 1 mM to about 15 mM.

The application's sequence listing, which the Patent Office published only in electronic form, follows.

SEQUENCE LISTING (1581 sequences)

SEQ ID NO: 1 - protein, 7 aa, Artificial Sequence
  Description of Artificial Sequence: Synthetic peptide
LYWTGMR

SEQ ID NO: 2 - protein, 7 aa, Simian virus 40
PKKKRKV

SEQ ID NO: 3 - protein, 16 aa, Unknown
  Description of Unknown: Nucleoplasmin bipartite NLS sequence
KRPAATKKAGQAKKKK

SEQ ID NO: 4 - protein, 9 aa, Unknown
  Description of Unknown: c-Myc NLS sequence
PAAKRVKLD

SEQ ID NO: 5 - protein, 11 aa, Unknown
  Description of Unknown: c-Myc NLS sequence
RQRRNELKRSP

SEQ ID NO: 6 - protein, 38 aa, Homo sapiens
NQSSNFGPMKGGNFGGRSSGPYGGGGQYFAKPRNQGGY

SEQ ID NO: 7 - protein, 42 aa, Unknown
  Description of Unknown: IBB domain from importin-alpha sequence
RMRIZFKNKGKDTAELRRRRVEVSVELRKAKKDEQILKRRNV

SEQ ID NO: 8 - protein, 8 aa, Unknown
  Description of Unknown: myoma T protein sequence
VSRKRPRP

SEQ ID NO: 9 - protein, 8 aa, Unknown
  Description of Unknown: myoma T protein sequence
PPKKARED

SEQ ID NO: 10 - protein, 8 aa, Homo sapiens
PQPKKKPL

SEQ ID NO: 11 - protein, 12 aa, Mus sp.
SALIKKKKKMAP

SEQ ID NO: 12 - protein, 5 aa, Influenza virus
DRLRR

SEQ ID NO: 13 - protein, 7 aa, Influenza virus
PKQKKRK

SEQ ID NO: 14 - protein, 10 aa, Hepatitis delta virus
RKLKKKIKKL

SEQ ID NO: 15 - protein, 10 aa, Mus sp.
REKKKFLKRR

SEQ ID NO: 16 - protein, 20 aa, Homo sapiens
KRKGDEVDGVDEVAKKKSKK

SEQ ID NO: 17 - protein, 17 aa, Homo sapiens
RKCLQAGMNLEARKTKK

SEQ ID NO: 18 - protein, 4 aa, Artificial Sequence
  Description of Artificial Sequence: Synthetic peptide
GGGS

SEQ ID NO: 19 - protein, 15 aa, Artificial Sequence
  Description of Artificial Sequence: Synthetic peptide
GGGGSGGGGSGGGGS

SEQ ID NO: 20 - protein, 30 aa, Artificial Sequence
  Description of Artificial Sequence: Synthetic polypeptide
GGGGSGGGGSGGGGSGGGGSGGGGSGGGGS

SEQ ID NO: 21 - protein, 45 aa, Artificial Sequence
  Description of Artificial Sequence: Synthetic polypeptide
GGGGSGGGGSGGGGSGGGGSGGGGSGGGGSGGGGSGGGGSGGGGS

SEQ ID NO: 22 - protein, 60 aa, Artificial Sequence
  Description of Artificial Sequence: Synthetic polypeptide
GGGGSGGGGSGGGGSGGGGSGGGGSGGGGSGGGGSGGGGSGGGGSGGGGSGGGGSGGGGS

SEQ ID NO: 23 - DNA, 20 bp, Artificial Sequence
  Description of Artificial Sequence: Synthetic oligonucleotide
gagtccgagcagaagaagaa

SEQ ID NO: 24 - DNA, 20 bp, Homo sapiens
gagtcctagcaggagaagaa

SEQ ID NO: 25 - DNA, 20 bp, Homo sapiens
gagtctaagcagaagaagaa

SEQ ID NO: 26 - protein, 9 aa, Unknown
  Description of Unknown: "LAGLIDADG" family motif peptide
LAGLIDADG

SEQ ID NO: 27 - RNA, 36 nt, Artificial Sequence
  Description of Artificial Sequence: Synthetic oligonucleotide
gccgcagcgaaugccguuucacgaaucgucaggcgg

SEQ ID NO: 28 - RNA, 75 nt, Artificial Sequence
  Description of Artificial Sequence: Synthetic oligonucleotide
gcuggagacguuuuuugaaacggcgagugcugcggauagcgaguuucucuuggggaggcgcucgcggccacuuuu

SEQ ID NO: 29 - protein, 1388 aa, Artificial Sequence
  Description of Artificial Sequence: Synthetic polypeptide
MSLNRIYQGRVAAVETGTALAKGNVEWMPAAGGDEVLWQHHELFQAAINYYLVALLALADKNNPVLGPLISQMDNPQSPYHVWGSFRRQGRQRTGLSQAVAPYITPGNNAPTLDEVFRSILAGNPTDRATLDAALMQLLKACDGAGAIQQEGRSYWPKFCDPDSTANFAGDPAMLRREQHRLLLPQVLHDPAITHDSPALGSFDTYSIATPDTRTPQLTGPKARARLEQAITLWRVRLPESAADFDRLASSLKKIPDDDSRLNLQGYVGSSAKGEVQARLFALLLFRHLERSSFTLGLLRSATPPPKNAETPPPAGVPLPAASAADPVRIARGKRSFVFRAFTSLPCWHGGDNIHPTWKSFDIAAFKYALTVINQIEEKTKERQKECAELETDFDYMHGRLAKIPVKYTTGEAEPPPILANDLRIPLLRELLQNIKVDTALTDGEAVSYGLQRRTIRGFRELRRIWRGHAPAGTVFSSELKEKLAGELRQFQTDNSTTIGSVQLFNELIQNPKYWPIWQAPDVETARQWADAGFADDPLAALVQEAELQEDIDALKAPVKLTPADPEYSRRQYDFNAVSKFGAGSRSANRHEPGQTERGHNTFTTEIAARNAADGNRWRATHVRIHYSAPRLLRDGLRRPDTDGNEALEAVPWLQPMMEALAPLPTLPQDLTGMPVFLMPDVTLSGERRILLNLPVTLEPAALVEQLGNAGRWQNQFFGSREDPFALRWPADGAVKTAKGKTHIPWHQDRDHFTVLGVDLGTRDAGALALLNVTAQKPAKPVHRIIGEADGRTWYASLADARMIRLPGEDARLFVRGKLVQEPYGERGRNASLLEWEDARNIILRLGQNPDELLGADPRRHSYPEINDKLLVALRRAQARLARLQNRSWRLRDLAESDKALDEIHAERAGEKPSPLPPLARDDAIKSTDEALLSQRDIIRRSFVQIANLILPLRGRRWEWRPHVEVPDCHILAQSDPGTDDTKRLVAGQRGISHERIEQIEELRRRCQSLNRALRHKPGERPVLGRPAKGEEIADPCPALLEKINRLRDQRVDQTAHAILAAALGVRLRAPSKDRAERRHRDIHGEYERFRAPADFVVIENLSRYLSSQDRARSENTRLMQWCHRQIVQKLRQLCETYGIPVLAVPAAYSSRFSSRDGSAGFRAVHLTPDHRHRMPWSRILARLKAHEEDGKRLEKTVLDEARAVRGLFDRLDRFNAGHVPGKPWRTLLAPLPGGPVFVPLGDATPMQADLNAAINIALRGIAAPDRHDIHHRLRAENKKRILSLRLGTQREKARWPGGAPAVTLSTPNNGASPEDSDALPERVSNLFVDIAGVANFERVTIEGVSQKFATGRGLWASVKQRAWNRVARLNETVTDNNRNEEEDDIPM

SEQ ID NO: 30 - RNA, 36 nt, Artificial Sequence
  Description of Artificial Sequence: Synthetic oligonucleotide
guccaagaaaaaagaaaugauacgaggcauuagcac

SEQ ID NO: 31 - RNA, 107 nt, Artificial Sequence
  Description of Artificial Sequence: Synthetic polynucleotide
cuggacgaugucucuuuuauuucuuuuuucuuggaucugaguacgagcacccacauuggacauuucgcauggugggugcucguacuauagguaaaacaaaccuuuuu

SEQ ID NO: 32 - protein, 1108 aa, Bacillus thermoamylovorans
MATRSFILKIEPNEEVKKGLWKTHEVLNHGIAYYMNILKLIRQEAIYEHHEQDPKNPKKVSKAEIQAELWDFVLKMQKCNSFTHEVDKDVVFNILRELYEELVPSSVEKKGEANQLSNKFLYPLVDPNSQSGKGTASSGRKPRWYNLKIAGDPSWEEEKKKWEEDKKKDPLAKILGKLAEYGLIPLFIPFTDSNEPIVKEIKWMEKSRNQSVRRLDKDMFIQALERFLSWESWNLKVKEEYEKVEKEHKTLEERIKEDIQAFKSLEQYEKERQEQLLRDTLNTNEYRLSKRGLRGWREIIQKWLKMDENEPSEKYLEVFKDYQRKHPREAGDYSVYEFLSKKENHFIWRNHPEYPYLYATFCEIDKKKKDAKQQATFTLADPINHPLWVRFEERSGSNLNKYRILTEQLHTEKLKKKLTVQLDRLIYPTESGGWEEKGKVDIVLLPSRQFYNQIFLDIEEKGKHAFTYKDESIKFPLKGTLGGARVQFDRDHLRRYPHKVESGNVGRIYFNMTVNIEPTESPVSKSLKIHRDDFPKFVNFKPKELTEWIKDSKGKKLKSGIESLEIGLRVMSIDLGQRQAAAASIFEVVDQKPDIEGKLFFPIKGTELYAVHRASFNIKLPGETLVKSREVLRKAREDNLKLMNQKLNFLRNVLHFQQFEDITEREKRVTKWISRQENSDVPLVYQDELIQIRELMYKPYKDWVAFLKQLHKRLEVEIGKEVKHWRKSLSDGRKGLYGISLKNIDEIDRTRKFLLRWSLRPTEPGEVRRLEPGQRFAIDQLNHLNALKEDRLKKMANTIIMHALGYCYDVRKKKWQAKNPACQIILFEDLSNYNPYEERSRFENSKLMKWSRREIPRQVALQGEIYGLQVGEVGAQFSSRFHAKTGSPGIRCSVVTKEKLQDNRFFKNLQREGRLTLDKIAVLKEGDLYPDKGGEKFISLSKDRKLVTTHADINAAQNLQKRFWTRTHGFYKVYCKAYQVDGQTVYIPESKDQKQKIIEEFGEGYFILKDGVYEWGNAGKLKIKKGSSKQSSSELVDSDILKDSFDLASELKGEKLMLYRDPSGNVFPSDKWMAAGVFFGKLERILISKLTNQYSISTIEDDSSKQSM

SEQ ID NO: 33 - RNA, 36 nt, Artificial Sequence
  Description of Artificial Sequence: Synthetic oligonucleotide
guucgaaagcuuaguggaaagcuucgugguuagcac

SEQ ID NO: 34 - RNA, 69 nt, Artificial Sequence
  Description of Artificial Sequence: Synthetic oligonucleotide
cacggauaaucacgacuuuccacuaagcuuucgaauuuuaugaugcgagcauccucucaggucaaaaaa

SEQ ID NO: 35 - protein, 1108 aa, Bacillus sp.
MAIRSIKLKLKTHTGPEAQNLRKGIWRTHRLLNEGVAYYMKMLLLFRQESTGERPKEELQEELICHIREQQQRNQADKNTQALPLDKALEALRQLYELLVPSSVGQSGDAQIISRKFLSPLVDPNSEGGKGTSKAGAKPTWQKKKEANDPTWEQDYEKWKKRREEDPTASVITTLEEYGIRPIFPLYTNTVTDIAWLPLQSNQFVRTWDRDMLQQAIERLLSWESWNKRVQEEYAKLKEKMAQLNEQLEGGQEWISLLEQYEENRERELRENMTAANDKYRITKRQMKGWNELYELWSTFPASASHEQYKEALKRVQQRLRGRFGDAHFFQYLMEEKNRLIWKGNPQRIHYFVARNELTKRLEEAKQSATMTLPNARKHPLWVRFDARGGNLQDYYLTAEADKPRSRRFVTFSQLIWPSESGWMEKKDVEVELALSRQFYQQVKLLKNDKGKQKIEFKDKGSGSTFNGHLGGAKLQLERGDLEKEEKNFEDGEIGSVYLNVVIDFEPLQEVKNGRVQAPYGQVLQLIRRPNEFPKVTTYKSEQLVEWIKASPQHSAGVESLASGFRVMSIDLGLRAAAATSIFSVEESSDKNAADFSYWIEGTPLVAVHQRSYMLRLPGEQVEKQVMEKRDERFQLHQRVKFQIRVLAQIMRMANKQYGDRWDELDSLKQAVEQKKSPLDQTDRTFWEGIVCDLTKVLPRNEADWEQAVVQIHRKAEEYVGKAVQAWRKRFAADERKGIAGLSMWNIEELEGLRKLLISWSRRTRNPQEVNRFERGHTSHQRLLTHIQNVKEDRLKQLSHAIVMTALGYVYDERKQEWCAEYPACQVILFENLSQYRSNLDRSTKENSTLMKWAHRSIPKYVHMQAEPYGIQIGDVRAEYSSRFYAKTGTPGIRCKKVRGQDLQGRRFENLQKRLVNEQFLTEEQVKQLRPGDIVPDDSGELFMTLTDGSGSKEVVFLQADINAAHNLQKRFWQRYNELFKVSCRVIVRDEEEYLVPKTKSVQAKLGKGLFVKKSDTAWKDVYVWDSQAKLKGKTTFTEESESPEQLEDFQEIIEEAEEAKGTYRTLFRDPSGVFFPESVWYPQKDFWGEVKRKLYGKLRERFLTKAR

SEQ ID NO: 36 - RNA, 35 nt, Artificial Sequence
  Description of Artificial Sequence: Synthetic oligonucleotide
guuuugagaauagcccgacauagagggcaauagac

SEQ ID NO: 37 - RNA, 36 nt, Artificial Sequence
  Description of Artificial Sequence: Synthetic oligonucleotide
guuaugaaaacagcccgacauagagggcaauagaca

SEQ ID NO: 38 - protein, 1334 aa, Artificial Sequence
  Description of Artificial Sequence: Synthetic polypeptide
MKISKVDHTRMAVAKGNQHRRDEISGILYKDPTKTGSIDFDERFKKLNCSAKILYHVFNGIAEGSNKYKNIVDKVNNNLDRVLFTGKSYDRKSIIDIDTVLRNVEKINAFDRISTEEREQIIDDLLEIQLRKGLRKGKAGLREVLLIGAGVIVRTDKKQEIADFLEILDEDFNKTNQAKNIKLSIENQGLVVSPVSRGEERIFDVSGAQKGKSSKKAQEKEALSAFLLDYADLDKNVRFEYLRKIRRLINLYFYVKNDDVMSLTEIPAEVNLEKDFDIWRDHEQRKEENGDFVGCPDILLADRDVKKSNSKQVKIAERQLRESIREKNIKRYRFSIKTIEKDDGTYFFANKQISVFWIHRIENAVERILGSINDKKLYRLRLGYLGEKVWKDILNFLSIKYIAVGKAVFNFAMDDLQEKDRDIEPGKISENAVNGLTSFDYEQIKADEMLQREVAVNVAFAANNLARVTVDIPQNGEKEDILLWNKSDIKKYKKNSKKGILKSILQFFGGASTWNMKMFEIAYHDQPGDYEENYLYDIIQIIYSLRNKSFHFKTYDHGDKNWNRELIGKMIEHDAERVISVEREKFHSNNLPMFYKDADLKKILDLLYSDYAGRASQVPAFNTVLVRKNFPEFLRKDMGYKVHFNNPEVENQWHSAVYYLYKEIYYNLFLRDKEVKNLFYTSLKNIRSEVSDKKQKLASDDFASRCEEIEDRSLPEICQIIMTEYNAQNFGNRKVKSQRVIEKNKDIFRHYKMLLIKTLAGAFSLYLKQERFAFIGKATPIPYETTDVKNFLPEWKSGMYASFVEEIKNNLDLQEWYIVGRFLNGRMLNQLAGSLRSYIQYAEDIERRAAENRNKLFSKPDEKIEACKKAVRVLDLCIKISTRISAEFTDYFDSEDDYADYLEKYLKYQDDAIKELSGSSYAALDHFCNKDDLKFDIYVNAGQKPILQRNIVMAKLFGPDNILSEVMEKVTESAIREYYDYLKKVSGYRVRGKCSTEKEQEDLLKFQRLKNAVEFRDVTEYAEVINELLGQLISWSYLRERDLLYFQLGFHYMCLKNKSFKPAEYVDIRRNNGTIIHNAILYQIVSMYINGLDFYSCDKEGKTLKPIETGKGVGSKIGQFIKYSQYLYNDPSYKLEIYNAGLEVFENIDEHDNITDLRKYVDHFKYYAYGNKMSLLDLYSEFFDRFFTYDMKYQKNVVNVLENILLRHFVIFYPKFGSGKKDVGIRDCKKERAQIEISEQSLTSEDFMFKLDDKAGEEAKKFPARDERYLQTIAKLLYYPNEIEDMNRFMKKGETINKKVQFNRKKKITRKQKNNSSNEVLSSTMGYLFKNIKL

SEQ ID NO: 39 - RNA, 36 nt, Artificial Sequence
  Description of Artificial Sequence: Synthetic oligonucleotide
guuuuaguccucuuucauauagagguagucucuuac

SEQ ID NO: 40 - RNA, 99 nt, Artificial Sequence
  Description of Artificial Sequence: Synthetic oligonucleotide
augaaaagaggacuaaaacugaaagaggacuaaaacaccagauguggauaacuauauuaguggcuauuaaaaauucgucgauauuagagaggaaacuuu

SEQ ID NO: 41 - protein, 1120 aa, Listeria seeligeri
MWISIKTLIHHLGVLFFCDYMYNRREKKIIEVKTMRITKVEVDRKKVLISRDKNGGKLVYENEMQDNTEQIMHHKKSSFYKSVVNKTICRPEQKQMKKLVHGLLQENSQEKIKVSDVTKLNISNFLNHRFKKSLYYFPENSPDKSEEYRIEINLSQLLEDSLKKQQGTFICWESFSKDMELYINWAENYISSKTKLIKKSIRNNRIQSTESRSGQLMDRYMKDILNKNKPFDIQSVSEKYQLEKLTSALKATFKEAKKNDKEINYKLKSTLQNHERQIIEELKENSELNQFNIEIRKHLETYFPIKKTNRKVGDIRNLEIGEIQKIVNHRLKNKIVQRILQEGKLASYEIESTVNSNSLQKIKIEEAFALKFINACLFASNNLRNMVYPVCKKDILMIGEFKNSFKEIKHKKFIRQWSQFFSQEITVDDIELASWGLRGAIAPIRNEIIHLKKHSWKKFFNNPTFKVKKSKIINGKTKDVTSEFLYKETLFKDYFYSELDSVPELIINKMESSKILDYYSSDQLNQVFTIPNFELSLLTSAVPFAPSFKRVYLKGFDYQNQDEAQPDYNLKLNIYNEKAFNSEAFQAQYSLFKMVYYQVFLPQFTTNNDLFKSSVDFILTLNKERKGYAKAFQDIRKMNKDEKPSEYMSYIQSQLMLYQKKQEEKEKINHFEKFINQVFIKGFNSFIEKNRLTYICHPTKNTVPENDNIEIPFHTDMDDSNIAFWLMCKLLDAKQLSELRNEMIKFSCSLQSTEEISTFTKAREVIGLALLNGEKGCNDWKELFDDKEAWKKNMSLYVSEELLQSLPYTQEDGQTPVINRSIDLVKKYGTETILEKLFSSSDDYKVSAKDIAKLHEYDVTEKIAQQESLHKQWIEKPGLARDSAWTKKYQNVINDISNYQWAKTKVELTQVRHLHQLTIDLLSRLAGYMSIADRDFQFSSNYILERENSEYRVTSWILLSENKNKNKYNDYELYNLKNASIKVSSKNDPQLKVDLKQLRLTLEYLELFDNRLKEKRNNISHFNYLNGQLGNSILELFDDARDVLSYDRKLKNAVSKSLKEILSSHGMEVTFKPLYQTNHHLKIDKLQPKKIHHLGEKSTVSSNQVSNEYCQLVRTLLTMK

SEQ ID NO: 42 - RNA, 36 nt, Artificial Sequence
  Description of Artificial Sequence: Synthetic oligonucleotide
guuuuaguccccuucguuuuugggguagucuaaauc

SEQ ID NO: 43 - RNA, 113 nt, Artificial Sequence
  Description of Artificial Sequence: Synthetic polynucleotide
gauuuagagcaccccaaaaguaaugaaaauuugcaauuaaauaaggaauauuaaaaaaaugugauuuuaaaaaaauugaagaaauuaaaugaaaaauuguccaaguaaaaaaa

SEQ ID NO: 44 - RNA, 70 nt, Artificial Sequence
  Description of Artificial Sequence: Synthetic oligonucleotide
auuuagauuaccccuuuaauuuauuuuaccauauuuuucucauaaugcaaacuaauauuccaaaauuuuu

SEQ ID NO: 45 - protein, 1389 aa, Leptotrichia wadei
MGNLFGHKRWYEVRDKKDFKIKRKVKVKRNYDGNKYILNINENNNKEKIDNNKFIRKYINYKKNDNILKEFTRKFHAGNILFKLKGKEGIIRIENNDDFLETEEVVLYIEAYGKSEKLKALGITKKKIIDEAIRQGITKDDKKIEIKRQENEEEIEIDIRDEYTNKTLNDCSIILRIIENDELETKKSIYEIFKNINMSLYKIIEKIIENETEKVFENRYYEEHLREKLLKDDKIDVILTNFMEIREKIKSNLEILGFVKFYLNVGGDKKKSKNKKMLVEKILNINVDLTVEDIADFVIKELEFWNITKRIEKVKKVNNEFLEKRRNRTYIKSYVLLDKHEKFKIERENKKDKIVKFFVENIKNNSIKEKIEKILAEFKIDELIKKLEKELKKGNCDTEIFGIFKKHYKVNFDSKKFSKKSDEEKELYKIIYRYLKGRIEKILVNEQKVRLKKMEKIEIEKILNESILSEKILKRVKQYTLEHIMYLGKLRHNDIDMTTVNTDDFSRLHAKEELDLELITFFASTNMELNKIFSRENINNDENIDFFGGDREKNYVLDKKILNSKIKIIRDLDFIDNKNNITNNFIRKFTKIGTNERNRILHAISKERDLQGTQDDYNKVINIIQNLKISDEEVSKALNLDVVFKDKKNIITKINDIKISEENNNDIKYLPSFSKVLPEILNLYRNNPKNEPFDTIETEKIVLNALIYVNKELYKKLILEDDLEENESKNIFLQELKKTLGNIDEIDENIIENYYKNAQISASKGNNKAIKKYQKKVIECYIGYLRKNYEELFDFSDFKMNIQEIKKQIKDINDNKTYERITVKTSDKTIVINDDFEYIISIFALLNSNAVINKIRNRFFATSVWLNTSEYQNIIDILDEIMQLNTLRNECITENWNLNLEEFIQKMKEIEKDFDDFKIQTKKEIFNNYYEDIKNNILTEFKDDINGCDVLEKKLEKIVIFDDETKFEIDKKSNILQDEQRKLSNINKKDLKKKVDQYIKDKDQEIKSKILCRIIFNSDFLKKYKKEIDNLIEDMESENENKFQEIYYPKERKNELYIYKKNLFLNIGNPNFDKIYGLISNDIKMADAKFLFNIDGKNIRKNKISEIDAILKNLNDKLNGYSKEYKEKYIKKLKENDDFFAKNIQNKNYKSFEKDYNRVSEYKKIRDLVEFNYLNKIESYLIDINWKLAIQMARFERDMHYIVNGLRELGIIKLSGYNTGISRAYPKRNGSDGFYTTTAYYKFFDEESYKKFEKICYGFGIDLSENSEINKPENESIRNYISHFYIVRNPFADYSIAEQIDRVSNLLSYSTRYNNSTYASVFEVFKKDVNLDYDELKKKFKLIGNNDILERLMKPKKVSVLELESYNSDYIKNLIIELLTKIENTNDTL

SEQ ID NO: 46 - RNA, 36 nt, Artificial Sequence
  Description of Artificial Sequence: Synthetic oligonucleotide
guuuuaguccccuucgauauugggguggucuauauc

SEQ ID NO: 47 - RNA, 95 nt, Artificial Sequence
  Description of Artificial Sequence: Synthetic oligonucleotide
auugaugugguauacuaaaaauggaaaauuguauuuuugauuagaaagauguaaaauugauuuaauuuaaaaauauuuuauuagauuaaaguaga

SEQ ID NO: 48 - protein, 1300 aa, Leptotrichia shahii
MSIYQEFVNKYSLSKTLRFELIPQGKTLENIKARGLILDDEKRAKDYKKAKQIIDKYHQFFIEEILSSVCISEDLLQNYSDVYFKLKKSDDDNLQKDFKSAKDTIKKQISEYIKDSEKFKNLFNQNLIDAKKGQESDLILWLKQSKDNGIELFKANSDITDIDEALEIIKSFKGWTTYFKGFHENRKNVYSSNDIPTSIIYRIVDDNLPKFLENKAKYESLKDKAPEAINYEQIKKDLAEELTFDIDYKTSEVNQRVFSLDEVFEIANFNNYLNQSGITKFNTIIGGKFVNGENTKRKGINEYINLYSQQINDKTLKKYKMSVLFKQILSDTESKSFVIDKLEDDSDVVTTMQSFYEQIAAFKTVEEKSIKETLSLLFDDLKAQKLDLSKIYFKNDKSLTDLSQQVFDDYSVIGTAVLEYITQQIAPKNLDNPSKKEQELIAKKTEKAKYLSLETIKLALEEFNKHRDIDKQCRFEEILANFAAIPMIFDEIAQNKDNLAQISIKYQNQGKKDLLQASAEDDVKAIKDLLDQTNNLLHKLKIFHISQSEDKANILDKDEHFYLVFEECYFELANIVPLYNKIRNYITQKPYSDEKFKLNFENSTLANGWDKNKEPDNTAILFIKDDKYYLGVMNKKNNKIFDDKAIKENKGEGYKKIVYKLLPGANKMLPKVFFSAKSIKFYNPSEDILRIRNHSTHTKNGSPQKGYEKFEFNIEDCRKFIDFYKQSISKHPEWKDFGFRFSDTQRYNSIDEFYREVENQGYKLTFENISESYIDSVVNQGKLYLFQIYNKDFSAYSKGRPNLHTLYWKALFDERNLQDVVYKLNGEAELFYRKQSIPKKITHPAKEAIANKNKDNPKKESVFEYDLIKDKRFTEDKFFFHCPITINFKSSGANKFNDEINLLLKEKANDVHILSIDRGERHLAYYTLVDGKGNIIKQDTFNIIGNDRMKTNYHDKLAAIEKDRDSARKDWKKINNIKEMKEGYLSQVVHEIAKLVIEYNAIVVFEDLNFGFKRGRFKVEKQVYQKLEKMLIEKLNYLVFKDNEFDKTGGVLRAYQLTAPFETFKKMGKQTGIIYYVPAGFTSKICPVTGFVNQLYPKYESVSKSQEFFSKFDKICYNLDKGYFEFSFDYKNFGDKAAKGKWTIASFGSRLINFRNSDKNHNWDTREVYPTKELEKLLKDYSIEYGHGECIKAAICGESDKKFFAKLTSVLNTILQMRNSKTGTELDYLISPVADVNGNFFDSRQAPKNMPQDADANGAYHIGLKGLMLLGRIKNNQEGKKLNLVIKNEEYFEFVQNRNN

SEQ ID NO: 49 - RNA, 36 nt, Artificial Sequence
  Description of Artificial Sequence: Synthetic oligonucleotide
gucuaagaacuuuaaauaauuucuacuguuguagau

SEQ ID NO: 50 - RNA, 71 nt, Artificial Sequence
  Description of Artificial Sequence: Synthetic oligonucleotide
aucuacaaaauuauaaacuaaauaaagauucuuauaauaacuuuauauauaaucgaaauguagagaauuuu

SEQ ID NO: 51 - protein, 1300 aa, Francisella ularensis; identical to SEQ ID NO: 48

SEQ ID NO: 52 - DNA, 138 bp, Artificial Sequence
  Description of Artificial Sequence: Synthetic polynucleotide
aaaaggccggcggccacgaaaaaggccggccaggcaaaaaagaaaaagggatcctacccatacgatgttccagattacgcttatccctacgacgtgcctgattatgcatacccatatgatgtccccgactatgcctaa

SEQ ID NO: 53 - protein, 1388 aa, Artificial Sequence; identical to SEQ ID NO: 29
  Description of Artificial Sequence: Synthetic polypeptide

SEQ ID NO: 54 - protein, 1108 aa, Artificial Sequence; identical to SEQ ID NO: 32
  Description of Artificial Sequence: Synthetic polypeptide

SEQ ID NO: 55 - protein, 1108 aa, Artificial Sequence; identical to SEQ ID NO: 35
  Description of Artificial Sequence: Synthetic polypeptide

SEQ ID NO: 56 - protein, 1334 aa, Artificial Sequence; identical to SEQ ID NO: 38
  Description of Artificial Sequence: Synthetic polypeptide

SEQ ID NO: 57 - protein, 1120 aa, Artificial Sequence; identical to SEQ ID NO: 41
  Description of Artificial Sequence: Synthetic polypeptide

SEQ ID NO: 58 - protein, 1152 aa, Artificial Sequence
  Description of Artificial Sequence: Synthetic polypeptide
MKVTKVDGISHKKYIEEGKLVKSTSEENRTSERLSELLSIRLDIYIKNPDNASEEENRIRRENLKKFFSNKVLHLKDSVLYLKNRKEKNAVQDKNYSEEDISEYDLKNKNSFSVLKKILLNEDVNSEELEIFRKDVEAKLNKINSLKYSFEENKANYQKINENNVEKVGGKSKRNIIYDYYRESAKRNDYINNVQEAFDKLYKKEDIEKLFFLIENSKKHEKYKIREYYHKIIGRKNDKENFAKIIYEEIQNVNNIKELIEKIPDMSELKKSQVFYKYYLDKEELNDKNIKYAFCHFVEIEMSQLLKNYVYKRLSNISNDKIKRIFEYQNLKKLIENKLLNKLDTYVRNCGKYNYYLQVGEIATSDFIARNRQNEAFLRNIIGVSSVAYFSLRNILETENENDITGRMRGKTVKNNKGEEKYVSGEVDKIYNENKQNEVKENLKMFYSYDFNMDNKNEIEDFFANIDEAISSIRHGIVHFNLELEGKDIFAFKNIAPSEISKKMFQNEINEKKLKLKIFKQLNSANVFNYYEKDVIIKYLKNTKFNFVNKNIPFVPSFTKLYNKIEDLRNTLKFFWSVPKDKEEKDAQIYLLKNIYYGEFLNKFVKNSKVFFKITNEVIKINKQRNQKTGHYKYQKFENIEKTVPVEYLAIIQSREMINNQDKEEKNTYIDFIQQIFLKGFIDYLNKNNLKYIESNNNNDNNDIFSKIKIKKDNKEKYDKILKNYEKHNRNKEIPHEINEFVREIKLGKILKYTENLNMFYLILKLLNHKELTNLKGSLEKYQSANKEETFSDELELINLLNLDNNRVTEDFELEANEIGKFLDFNENKIKDRKELKKFDTNKIYFDGENIIKHRAFYNIKKYGMLNLLEKIADKAKYKISLKELKEYSNKKNEIEKNYTMQQNLHRKYARPKKDEKFNDEDYKEYEKAIGNIQKYTHLKNKVEFNELNLLQGLLLKILHRLVGYTSIWERDLRFRLKGEFPENHYIEEIFNFDNSKNVKYKSGQIVEKYINFYKELYKDNVEKRSIYSDKKVKKLKQEKKDLYIRNYIAHFNYIPHAEISLLEVLENLRKLLSYDRKLKNAIMKSIVDILKEYGFVATFKIGADKKIEIQTLESEKIVHLKNLKKKKLMTDRNSEELCELVKVMFEYKALE

SEQ ID NO: 59 - protein, 1389 aa, Artificial Sequence; identical to SEQ ID NO: 45
  Description of Artificial Sequence: Synthetic polypeptide

SEQ ID NO: 60 - protein, 1300 aa, Artificial Sequence; identical to SEQ ID NO: 48
  Description of Artificial Sequence: Synthetic polypeptide

SEQ ID NO: 61 - DNA, 7403 bp, Artificial Sequence
  Description of Artificial Sequence: Synthetic polynucleotide
tatccggtcgaatcgagaatgacgaccgctacgtcttggactacgaagccgtggcccttgccgatgctctcggtgtggatgttgccgacctgttccgcaagatcgattgccccaagaacctgctgcgcaggcgggcagggtaggggagcggtttccggcggagattttcggaggcgccggtaacgttatgtcggggaatttgctatacatcgacgataattagttttgttgattcaggatcgaaatgcgctcaaacaaagaacgttccgcgtttccctcatgcgctactacgcccacaccgccatctttcggcacgcaaacaaagcagatgggttgcctgtcaatgggtgatcattgcctgaagttaccatccatcaataatataaatcatccttactccgaatgtccctcaatcgcatctatcaaggccgcgtggcggccgtcgaaacaggaacggccttagcgaaaggtaatgtcgaatggatgcctgccgcaggaggcgacgaagttctctggcagcaccacgaacttttccaagctgccatcaactactatctcgtcgccctgctcgcactcgccgacaaaaacaatcccgtacttggcccgctgatcagccagatggataatccccaaagcccttaccatgtctggggaagtttccgccgccaaggacgtcagcgcacaggtctcagtcaagccgttgcaccttatatcacgccgggcaataacgctcccacccttgacgaagttttccgctccattcttgcgggcaacccaaccgaccgcgcaactttggacgctgcactcatgcaattgctcaaggcttgtgacggcgcgggcgctatccagcaggaaggtcgttcctactggcccaaattctgcgatcctgactccactgccaacttcgcgggagatccggccatgctccggcgtgaacaacaccgcctcctccttccgcaagttctccacgatccggcgattactcacgacagtcctgcccttggctcgttcgacacttattcgattgctacccccgacaccagaactcctcaactcaccggccccaaggcacgcgcccgtcttgagcaggcgatcaccctctggcgcgtccgtcttcccgaatcggctgctgacttcgatcgccttgccagttccctcaaaaaaattccggacgacgattctcgccttaaccttcagggctacgtcggcagcagtgcgaaaggcgaagttcaggcccgtcttttcgcccttctgctattccgtcacctggagcgttcctcctttacgcttggccttctccgttccgccaccccgccgcccaagaacgctgaaacacctcctcccgccggcgttcctttacctgcggcgtccgcagccgatccggtgcggatagcccgtggcaaacgcagttttgtttttcgcgcattcaccagtctcccctgctggcatggcggtgataacatccatcccacctggaagtcattcgacatcgcagcgttcaaatatgccctcacggtcatcaaccagatcgaggaaaagacgaaagaacgccaaaaagaatgtgcggaacttgaaactgatttcgactacatgcacggacggctcgccaagattccggtaaaatacacgaccggcgaagccgaaccgccccccattctcgcaaacgatctccgcatccccctcctccgcgaacttctccagaatatcaaggtcgacaccgcactcaccgatggcgaagccgtctcctatggtctccaacgccgcaccattcgcggtttccgcgagctgcgccgcatctggcgcggccatgcccccgctggcacggtcttttccagcgagttgaaagaaaaactagccggcgaactccgccagttccagaccgacaactccaccaccatcggcagcgtccaactcttcaacgaactcatccaaaacccgaaatactggcccatctggcaggctcctgacgtcgaaaccgcccgccaatgggccgatgccggttttgccgacgatccgctcgccgcccttgtgcaagaagccgaactccaggaagacatcgacgccctcaaggctccagtcaaactcactccggccgatcctgagtattcaagaaggcaatacgatttcaatgccgtcagcaaattcggggccggctcccgctccgccaatcgccacgaacccgggcagacggagcgcggccacaacacctttaccaccgaaatcgccgcccgtaacgcggcggacgggaaccgctggcgggcaacccacgtccgcatccattactccgctccccgccttcttcgtgacggactccgccgacctgacaccgacggcaacgaagccctggaagccgtcccttggctccagcccatgatggaagccctcgcccctctcccgacgcttccgcaagacctcacaggcatgccggtcttcctcatgcccgacgtcaccctttccggtgagcgtcgcatcctcctcaatcttcctgtcaccctcgaaccagccgctcttgtcgaacaactgggcaacgccggtcgctggcaaaaccagttcttcggctcccgcgaagatccattcgctctccgatggcccgccgacggtgctgtaaaaaccgccaaggggaaaacccacataccttggcaccaggaccgcgatcacttcaccgtactcggcgtggatctcggcacgcgcgatgccggggcgctcgctcttctcaacgtcactgcgcaaaaaccggccaagccggtccaccgcatcattggtgaggccgacggacgcacctggtatgccagccttgccgacgctcgcatgatccgcctgcccggggaggatgcccggctctttgtccggggaaaactcgttcaggaaccctatggtgaacgcgggcgaaacgcgtctcttctcgaatgggaagacgcccgcaatatcatccttcgccttggccaaaatcccgacgaactcctcggcgccgatccccggcgccattcgtatccggaaataaacgataaacttctcgtcgcccttcgccgcgctcaggcccgtcttgcccgtctccagaaccggagctggcggttgcgcgaccttgcagaatcggacaaggcccttgatgaaatccatgccgagcgtgccggggagaagccttctccgcttccgcccttggctcgcgacgatgccatcaaaagcaccgacgaagccctcctttcccagcgtgacatcatccggcgatccttcgttcagatcgccaacttgatccttccccttcgcggacgccgatgggaatggcggccccatgtcgaggtcccggattgccacatccttgcgcagagcgatcccggtacggatgacaccaagcgtcttgtcgccggacaacgcggcatctctcacgagcgtatcgagcaaatcgaagaactccgtcgtcgctgccaatccctcaaccgtgccctgcgtcacaaacccggagagcgtcccgtgctcggacgccccgccaagggcgaggaaatcgccgatccctgtcccgcgctcctcgaaaagatcaaccgtctccgggaccagcgcgttgaccaaaccgcgcatgccatcctcgccgccgctctcggtgttcgactccgcgccccctcaaaagaccgcgccgaacgccgccatcgcgacatccatggcgaatacgaacgctttcgtgcgcccgctgattttgtcgtcatcgaaaacctctcccgttatctcagctcgcaggatcgtgctcgtagtgaaaacacccgtctcatgcagtggtgccatcgccagatcgtgcaaaaactccgtcagctctgcgagacctacggcatccccgtcctcgccgtcccggcggcctactcatcgcgtttttcttcccgggacggctcggccggattccgggccgtccatctgacaccggaccaccgtcaccggatgccatggagccgcatcctcgcccgcctcaaggcccacgaggaagacggaaaaagactcgaaaagacggtgctcgacgaggctcgcgccgtccggggactctttgaccggctcgaccggttcaacgccgggcatgtcccgggaaaaccttggcgcacgctcctcgcgccgctccccggcggccctgtgtttgtccccctcggggacgccacacccatgcaggccgatctgaacgccgccatcaacatcgccctccggggcatcgcggctcccgaccgccacgacatccatcaccggctccgtgccgaaaacaaaaaacgcatcctgagcttgcgtctcggcactcagcgcgagaaagcccgctggcctggaggagctccggcggtgacactctccactccgaacaacggcgcctctcccgaagattccgatgcgttgcccgaacgggtatccaacctgtttgtggacatcgccggtgtcgccaacttcgagcgagtcacgatcgaaggagtctcgcaaaaattcgccaccgggcgtggcctttgggcctccgtcaagcaacgtgcatggaaccgcgttgccagactcaacgagacagtaacagataacaacaggaacgaagaggaggacgacattccgatgtaaccattgcttcattacatctgagtctcccctcaatccctctgccccatgcgtgatataacctccacctcatgtcccggatcggcgccggcaacctgtagttcccttccatcctccaacactcccgcagatcgcgatccgctgccgccgatgccggtgcgccgccttcacaactatctctactgtccgcggcttttttatctccagtgggtcgagaatctctttgaggaaaatgccgacaccattgccggcagcgccgtgcatcgtcacgccgacaaacctacgcgttacgatgatgaaaaagccgaggcacttcgcactggtctccctgaaggcgcgcacatacgcagccttcgcctggaaaacgcccaactcggtctcgttggcgtggtggatatcgtggagggaggccccgacggactcgaactcgtcgactacaaaaaaggttccgccttccgcctcgacgacggcacgctcgctcccaaggaaaacgacaccgtgcaacttgccgcctacgctcttctcctggctgccgatggtgcgcgcgttgcgcccatggcgacggtctattacgctgccgatcgccggcgtgtcaccttcccgctcgatgacgccctctacgcccgcacccgttccgccctcgaagaggcccgcgccgttgcaacctcggggcgcatacctccgccgctcgtctctgacgtccgctgcctccattgttcctcctatgcgctttgccttccccgcgagtccgcctggtggtgccgccatcgcagcacgccgcggggagccggccacacccccatgttgccgggctttgaggatgacgccgccgccattcaccaaatctccgaacctgacaccgagccaccacccgatcttgccagccagcctccccgtcccccgcggctcgatggagaattgttggttgtccagactccgggagcgatgatcggacaaagcggcggtgagtttaccgtgtccgtcaagggtgaggttttgcgcaagcttccggttcatcaactccgggccatttacgtttacggagccgtgcaactcacggcgcatgctgtgcagaccgcccttgaggaggatatcgacgtctcctattttgcgcccagcggccgctttcttggcctcctccgcggcctgcccgcatccggcgtggatgcgcgtctcgggcaatacaccctgtttcgcgaaccctttggccgtctccgtctcgcctgcgaggcgattcgggccaagatccataaccagcgcgtcctcctcatgcgtaacggcgagcccggggagggcgtcttgcgcgaactcgcccgtctgcgcgacgccaccagtgaggcgacttcgctcgacgaactcctcggcatcgagggcatcgccgcgcatttctatttccagtattttcccaccatgctgaaagaacgggcggcctgggcctttgatttttccggacgcaatcgccgcccgccgcgcgacccggtcaacgccctgctttcgttcggttacagcgtgttgtccaaggaacttgccggcgtctgccacgctgttggcctagacccgtttttcggcttcatgcaccagccgcgttacgggcgccccgcactcgctctcgatctgatggaggagtttcgccctctcatcgccgacagtgttgccctgaatctcatcaaccgtggcgaactcgacgaaggggactttatccggtcggccaatggcaccgcgctcaatgatcggggccgccggcgtttttgggaggcatggttccggcgtctcgacagcgaagtcagccatcctgaatttggttacaagatgagctatcgacggatgcttgaagtgcaggcgcgccagctatggcgctatgtgcgcggtgacgccttccgctaccacggattcaccacccgttgattccgatgtcagatccccgccgccgttatcttgtgtgttacgacatcgccaatccgaagcgattgcgccaagtggccaagctgctggagagctatggcacgcgtctgcaatactcggttttcgaatgtcctttggacgatcttcgtcttgaacaggcgaaggctgatttgcgcgacacgattaatgccgaccaagaccaggtgttatttgtttcgcttggccccgaagccaacgatgccacgttgatcatcgccacgcttgggctcccttataccgtgcgctcgcgagtgacgattatctgacccataacccacgtgttgaagaggctgaaaacagacggacctctatgaagaacaattgacgttttggccgaactcagcagacctttatgcggctaaggccaatgatcatccatcctaccgccattgggctggagacgttttttgaaacggcgagtgctgcggatagcgagtttctcttggggaggcgctcgcggccacttttacagaggagatgttcgggcgaactggccgacctaacaaggcgtacccggctcaaaatcgaggcacgctcgcacgggatgatgtaattcgttgtttttcagcataccgtgcgagcacgggccgcagcgaatgccgtttcacgaatcgtcaggcggcggggagaagtcatttaataaggccactgttaaaagccgcagcgaatgccgtttcacgaatcgtcaggcgggcagtggatgtttttccatgaggcgaagaatttcatcgccgcagtgaatgccgtttcaccattgatgaagaatgcgaggtgaaaacagagaaattgggtcaactctatcactcttattcagccatcgtttcaagaaaggatacctcgtattggatacaacacagctcgttcgttctctctacctccctcgacaatctcaagga

SEQ ID NO: 62 - DNA, 6789 bp, Artificial Sequence
  Description of Artificial Sequence: Synthetic polynucleotide
taataaaattgaaatatcactatggattattgtaatattaccataaagataggtgacgtttttttgaaaattgtaaacctaatttgaagaaaaccaattaaaaatcgcttcggcttttttttaagtgccaggtagcattgatgctaacccatgtgtaataaaggtttgttttccttcggggcacgaacacattataagggaaacctaaagattccctttcttgtttaatattataaccagtgaaaataagaataatgcacctaaaactaatatacagaaaataagaattaaaagtactaatatatacatcatatgttatcctccaatgctttattttttaataattgatgttagtattagttttattttaatttctaaacataagaatttgaaaaggatgtgtttattatggcgacacgcagttttattttaaaaattgaaccaaatgaagaagttaaaaagggattatggaagacgcatgaggtattgaatcatggaattgcctactacatgaatattctgaaactaattagacaggaagctatttatgaacatcatgaacaagatcctaaaaatccgaaaaaagtttcaaaagcagaaatacaagccgagttatgggattttgttttaaaaatgcaaaaatgtaatagttttacacatgaagttgacaaagatgttgtttttaacatcctgcgtgaactatatgaagagttggtccctagttcagtcgagaaaaagggtgaagccaatcaattatcgaataagtttctgtacccgctagttgatccgaacagtcaaagtgggaaagggacggcatcatccggacgtaaacctcggtggtataatttaaaaatagcaggcgacccatcgtgggaggaagaaaagaaaaaatgggaagaggataaaaagaaagatccccttgctaaaatcttaggtaagttagcagaatatgggcttattccgctatttattccatttactgacagcaacgaaccaattgtaaaagaaattaaatggatggaaaaaagtcgtaatcaaagtgtccggcgacttgataaggatatgtttatccaagcattagagcgttttctttcatgggaaagctggaaccttaaagtaaaggaagagtatgaaaaagttgaaaaggaacacaaaacactagaggaaaggataaaagaggacattcaagcatttaaatcccttgaacaatatgaaaaagaacggcaggagcaacttcttagagatacattgaatacaaatgaataccgattaagcaaaagaggattacgtggttggcgtgaaattatccaaaaatggctaaagatggatgaaaatgaaccatcagaaaaatatttagaagtatttaaagattatcaacggaaacatccacgagaagccggggactattctgtctatgaatttttaagcaagaaagaaaatcattttatttggcgaaatcatcctgaatatccttatttgtatgctacattttgtgaaattgacaaaaaaaagaaagacgctaagcaacaggcaacttttactttggctgacccgattaaccatccgttatgggtacgatttgaagaaagaagcggttcgaacttaaacaaatatcgaattttaacagagcaattacacactgaaaagttaaaaaagaaattaacagttcaacttgatcgtttaatttatccaactgaatccggcggttgggaggaaaaaggtaaagtagatatcgttttgttgccgtcaagacaattttataatcaaatcttccttgatatagaagaaaaggggaaacatgcttttacttataaggatgaaagtattaaattcccccttaaaggtacacttggtggtgcaagagtgcagtttgaccgtgaccatttgcggagatatccgcataaagtagaatcaggaaatgttggacggatttattttaacatgacagtaaatattgaaccaactgagagccctgttagtaagtctttgaaaatacatagggacgatttccccaagttcgttaattttaaaccgaaagagctcaccgaatggataaaagatagtaaagggaaaaaattaaaaagtggtatagaatcccttgaaattggtctacgggtgatgagtatcgacttaggtcaacgtcaagcggctgctgcatcgatttttgaagtagttgatcagaaaccggatattgaagggaagttattttttccaatcaaaggaactgagctttatgctgttcaccgggcaagttttaacattaaattaccgggtgaaacattagtaaaatcacgggaagtattgcggaaagctcgggaggacaacttaaaattaatgaatcaaaagttaaactttctaagaaatgttctacatttccaacagtttgaagatatcacagaaagagagaagcgtgtaactaaatggatttctagacaagaaaatagtgatgttcctcttgtatatcaagatgagctaattcaaattcgtgaattaatgtataaaccctataaagattgggttgcctttttaaaacaactccataaacggctagaagtcgagattggcaaagaggttaagcattggcgaaaatcattaagtgacgggagaaaaggtctttacggaatctccctaaaaaatattgatgaaattgatcgaacaaggaaattccttttaagatggagcttacgtccaacagaacctggggaagtaagacgcttggaaccaggacagcgttttgcgattgatcaattaaaccacctaaatgcattaaaagaagatcgattaaaaaagatggcaaatacgattatcatgcatgccttaggttactgttatgatgtaagaaagaaaaagtggcaggcaaaaaatccagcatgtcaaattattttatttgaagatttatctaactacaatccttacgaggaaaggtcccgttttgaaaactcaaaactgatgaagtggtcacggagagaaattccacgacaagtcgccttacaaggtgaaatttacggattacaagttggggaagtaggtgcccaattcagttcaagattccatgcgaaaaccgggtcgccgggaattcgttgcagtgttgtaacgaaagaaaaattgcaggataatcgcttttttaaaaatttacaaagagaaggacgacttactcttgataaaatcgcagttttaaaagaaggagacttatatccagataaaggtggagaaaagtttatttctttatcaaaggatcgaaagttggtaactacgcatgctgatattaacgcggcccaaaatttacagaagcgtttttggacaagaacacatggattttataaagtttactgcaaagcctatcaggttgatggacaaactgtttatattccggagagcaaggaccaaaaacaaaaaataattgaagaatttggggaaggctattttattttaaaagatggtgtatatgaatggggtaatgcggggaaactaaaaattaaaaaaggttcctctaaacaatcatcgagtgaattagtagattcggacatactgaaagattcatttgatttagcaagtgaacttaagggagagaaactcatgttatatcgagatccgagtggaaacgtatttccttccgacaagtggatggcagcaggagtattttttggcaaattagaaagaatattgatttctaagttaacaaatcaatactcaatatcaacaatagaagatgattcttcaaaacaatcaatgtaaaagtttgcccgtataagaacttaattaattaggatggtaggatgttactaaatatgtctgtaggcatcattcctactatccgttttgtccgaatatcagagcattaggtgaggaatggtaagaaaggaaaatttatatgaaccaaccgattcctattcgaatgttaaatgaaatacaatattgtgagcgacttttttactttatgcatgtccaaaagctatttgatgagaatgcagatacagttgaaggaagtgcacagcatgagcgggcagaaagaagcaaaagaccaagtaaaatgggaccaaaggaattatggggtgaggcgccaagaagtcttaagcttggtgatgagctgttaaatattaccggtgttcttgatgccataagtcatgaagagaacagttggatcccggttgaatcaaaacacagttccgcaccggatggattgaacccttttaaagtagatggctttctacttgacgggtctgcatggccaaacgatcaaattcaactttgtgcacaaggcttgctcttgaatgccaatggatacccgtgtgattatgggtatttattttatcgtggtaataagaaaaaggtgaaaatttattttactgaagatttaatcgctgccacaaagtactatattaaaaaagcacacgagatactagtattatctggtgatgaatcagctattcctaagcctttaattgattctaataagtgttttcgctgttctttaaactatatctgtcttccggatgaaacgaactatctattaggggcaagttcaacaattcgtaaaattgtgccttcaaggacagatggtggcgttttatatgtatcagagtctggtacaaaattaggaaaatcgggtgaggagttaatcattcagtataaagatggccaaaagcagggtgttcctataaaagatattattcaagtttcgttaattggaaatgttcaatgctcaacgcaattacttcattttttaatgcaatcaaatattcctgtaagttatttatcatcccacggtcgtttgattggtgtcagttcatctttagttacaaaaaatgttttaacaaggcagcaacagttcattaaatttacaaatcctgagtttggactaaatctagcaaaacaaattgtttatgccaagattcgaaatcaacgaactttacttagaagaaatggggggagtgaggtaaaggagattttaacagatttaaaatctttaagtgacagtgcactgaacgcaatatcaatagaacaattacggggtattgaagggatttctgcaaaacattatttcgcaggatttccgtttatgttgaaaaatgaattacgtgaattgaatttaatgaaagggcgtaataggagaccgccaaaagatcctgtaaatgtacttctttctcttggttatactttattgacacgtgatattcatgctgcgtgtggttcagtcggattggatccgatgtttggttgttaccatcgtccagaagcaggtcgaccggctctagtattagatgttatggaaacatttcgaccacttattgtagacagtattgtcatccgagctttgaatacgggtgaaatctcattaaaagatttttatataggaaaagatagttgtcaattattaaaacatggccgcgattccttttttgccatttatgaaagaagaatgcatgaaactattaccgatccaattttcggctataagattagctatcgccgtatgctcgatttgcacattcgaatgcttgcaaggtttattgaaggggaactgccggaatataaaccattaatgacccggtgagtttgtttattaggttaaaagaaggtgaagacatgcagcaatacgtccttgtttcttatgatatttcggaccaaaaaagatggagaaaagtatttaaactgatgaaaggatacggagaacatgttcaatattccgtattcatatgccagttaactgaattacagaaggcaaaattacaagcctctttagaagacattatccatcataagaatgaccaagtaatgtttgttcacatcgggccagtgaaagatggtcaactatctaaaaaaatctcaacaattgggaaagaatttgttccattggatttaaagcggcttatattttgaaaagatatagcaaagaaatcttatgaaaaaaatacaaaaatatattgttaaaaaatagggaatattatataatggacttacgaggttctgtcttttggtcaggacaaccgtctagctataagtgctgcaggggtgtgagaaactcctattgctggacgatgtctcttttatttcttttttcttggatctgagtacgagcacccacattggacatttcgcatggtgggtgctcgtactataggtaaaacaaacctttttaagaagaatacaaaaataaccacaatattttttaaaaggaattttgatggatttacataacctctcgcaacatgcttctaaaacccaagcccaccatagcccaaaaccccctgcggtccaagaaaaaagaaatgatacgaggcattagcaccggggagaagtcatttaataaggccactgttaaaagtccaagaaaaaagaaatgatacgaggcattagcacaacaatataaacgactactttaccgtgttcaagaaaaaagaaatgatatgaggcattagcacgatgggatgggagagagaggacagttctactcttgctgtatccagcttcttttactttatccggtatcatttcttcacttctttctgcacataaaaaagcacctaactatttggataagttaagtgcttttatttccgtttgaagttgtctattgcttttttcttcatatcttcaaattttttctgtttctcagagtcaactttaccaactgtaatcccttttctttttggcattggggtatctttccaccttagtgtgttcataaggcttatatttatcactcattgtattcctccaacacaattataatttttccgtcatcctcaatccaaccgtcaactgtgacaaaagacgaatctctcttat

SEQ ID NO: 63 - DNA, 6214 bp, Artificial Sequence
  Description of Artificial Sequence: Synthetic polynucleotide
gtttcatttggaaagggagagcattggcttttctctttgtaaataaagtgcaagctttgtaataagcttctagtggagaagtgattgtttgaatcacccaatgcacacgcactaaagttagacgaacctataattcgtattagtaagtatagtacatgaagaaaaatgcaacaagcatttactctcttttaaataaagaattgatagctgttaatattgatagtatattataccttatagatgttcgattttttttgaaattcaaaaatcatacttagtaaagaaaggaaataacgtcatggacaagcgaaagcgtagaagttacgagtttaggtgggaagcgggaggcaccagtcatggcaatccgtagcataaaactaaaactaaaaacccacacaggcccggaagcgcaaaacctccgaaaaggaatatggcggacgcatcggttgttaaatgaaggcgtcgcctattacatgaaaatgctcctgctctttcgtcaggaaagcactggtgaacggccaaaagaagaactacaggaagaactgatttgtcacatacgcgaacagcaacaacgaaatcaggcagataaaaatacgcaagcgcttccgctagataaggcactggaagctttgcgccaactatatgaactgcttgtcccctcctcggtcggacaaagtggcgacgcccagatcatcagccgaaagtttctcagcccgctcgtcgatccgaacagcgaaggcggcaaaggtacttcgaaggcaggggcaaaacccacttggcagaagaaaaaagaagcgaacgacccaacctgggaacaggattacgaaaaatggaaaaaaagacgcgaggaagacccaaccgcttctgtgattactactttggaggaatacggcattagaccgatctttcccctgtacacgaacaccgtaacagatatcgcgtggttgccacttcaatccaatcagtttgtgcgaacctgggacagagacatgcttcaacaagcgattgaaagactgctcagttgggagagctggaacaaacgtgtccaggaagagtatgccaagctgaaagaaaaaatggctcaactgaacgagcaactcgaaggcggtcaggaatggatcagcttgctagagcagtacgaagaaaaccgagagcgagagcttagggaaaacatgaccgctgccaatgacaagtatcggattaccaagcggcaaatgaaaggctggaacgagctgtacgagctatggtcaacctttcccgccagtgccagtcacgagcaatacaaagaggcgctcaagcgtgtgcagcagcgactgagagggcggtttggggatgctcatttcttccagtatctgatggaagagaagaaccgcctgatctggaaggggaatccgcagcgtatccattattttgtcgcgcgcaacgaactgacgaaacggctggaggaagccaagcaaagcgccacgatgacgttgcccaatgccaggaagcatccattgtgggtgcgcttcgatgcacggggaggaaatttgcaagactactacttgacggctgaagcggacaaaccgagaagcagacgttttgtaacgtttagtcagttgatatggccaagcgaatcgggatggatggaaaagaaagacgtcgaggtcgagctagctttgtccaggcagttttaccagcaggtgaagttgctgaaaaatgacaaaggcaagcagaaaatcgagttcaaggataaaggttcgggctcgacgtttaacggacacttggggggagcaaagctacaactggagcggggcgatttggagaaggaagaaaaaaacttcgaggacggggaaatcggcagcgtttaccttaacgttgtcattgatttcgaacctttgcaagaagtgaaaaatggccgcgtgcaggcgccgtatggacaagtactgcaactcattcgtcgccccaacgagtttcccaaggtcactacctataagtcggagcaacttgttgaatggataaaagcttcgccacaacactcggctggggtggagtcgctggcatccggttttcgtgtaatgagcatagaccttgggctgcgcgcggctgcagcgacttctattttttctgtagaagagagtagcgataaaaatgcggctgatttttcctactggattgaaggaacgccgctggtcgctgtccatcagcggagctatatgctcaggttgcctggtgaacaggtagaaaaacaggtgatggaaaaacgggacgagcggttccagctacaccaacgtgtgaagtttcaaatcagagtgctcgcccaaatcatgcgtatggcaaataagcagtatggagatcgctgggatgaactcgacagcctgaaacaagcggttgagcagaaaaagtcgccgctcgatcaaacagaccggacattttgggaggggattgtctgcgacttaacaaaggttttgcctcgaaacgaagcggactgggaacaagcggtagtgcaaatacaccgaaaagcagaggaatacgtcggaaaagccgttcaggcatggcgcaagcgctttgctgctgacgagcgaaaaggcatcgcaggtctgagcatgtggaacatagaagaattggagggcttgcgcaagctgttgatttcctggagccgcaggacgaggaatccgcaggaggttaatcgctttgagcgaggccataccagccaccagcgtctgttgacccatatccaaaacgtcaaagaggatcgcctgaagcagttaagtcacgccattgtcatgactgccttggggtatgtttacgacgagcggaaacaagagtggtgcgccgaatacccggcttgccaggtcattctgtttgaaaatctgagccagtaccgttctaacctggatcgctcgaccaaagaaaactccaccttgatgaagtgggcgcatcgcagcattccgaaatacgtccacatgcaggcggagccatacgggattcagattggcgatgtccgggcggaatattcctctcgtttttacgccaagacaggaacgccaggcattcgttgtaaaaaggtgagaggccaagacctgcagggcagacggtttgagaacttgcagaagaggttagtcaacgagcaatttttgacggaagaacaagtgaaacagctaaggcccggcgacattgtcccggatgatagcggagaactgttcatgaccttgacagacggaagcggaagcaaggaggtcgtgtttctccaggccgatattaacgcggcgcacaatctgcaaaaacgtttttggcagcgatacaatgaactgttcaaggttagctgccgcgtcatcgtccgagacgaggaagagtatctcgttcccaagacaaaatcggtgcaggcaaagctgggcaaagggctttttgtgaaaaaatcggatacagcctggaaagatgtatatgtgtgggacagccaggcaaagcttaaaggtaaaacaacctttacagaagagtctgagtcgcccgaacaactggaagactttcaggagatcatcgaggaagcagaagaggcgaaaggaacataccgtacactgttccgcgatcctagcggagtcttttttcccgaatccgtatggtatccccaaaaagatttttggggcgaggtgaaaaggaagctgtacggaaaattgcgggaacggtttttgacaaaggctcggtaagggtgtgcaaggagagtgaatggcttgtcctggatacctgtccgcatgctaaatgaaattcagtattgtgagcgactgtaccatattatgcatgtgcaggggctgtttgaggaaagcgcagacacggtcgaaggagcagcacaacacaagcgtgcagagacacatctgcgcaaaagcaaggcagcgccggaagagatgtggggggacgctccgtttagcttgcagctcggcgaccctgtgcttggcattacgggaaagctggatgccgtctgtctggaagaaggtaagcagtggattccggtagaaggaaagcattcggcgtcgccagaaggcgggcagatgttcactgtaggcgtgtattcgctggacggttctgcctggcccaacgaccaaatccaattgtgtgcgcaaggcttgctgcttcgcgcgaatggatatgaatccgattatggctacttatactaccgtggcaataaaaagaaggttcgcattcctttttcgcaggaactcatagcggctactcacgcctgcattcaaaaagctcatcagcttcgggaagccgaaattccccctccgttgcaggagtcgaaaaagtgctttcgatgctcgttaaattacgtatgcatgcctgacgagacgaattacatgttggggttgagcgcaaacatcagaaagattgtgcccagtcgtccagatggcggggtactgtatgttacagagcagggggcaaaactgggcagaagcggagaaagcttgaccatcacctgccggggcgaaaagatagacgaaatcccgatcaaagacttgattcacgtgagcttgatggggcatgtgcaatgctctacgcagcttctgcacaccttgatgaactgtggcgtccacgtcagctacttgactacgcatggcacattgacaggaataatgactccccctttatcgaaaaacattcgaacaagagccaagcagtttatcaaatttcagcacgcggagatcgcccttggaatcgcgagaagggtcgtgtatgcgaaaatttccaatcagcgcacgatgctgcgccgcaatggctcaccagataaagcagttttaaaagagttaaaagagcttagagatcgcgcgtgggaggcgccatcactggaaatagtgagaggtatcgagggacgtgcagcacagttgtacatgcagtttttccctaccatgttaaagcacccagtagtagacggtatggcgatcatgaacggtcgcaaccgtcgcccgcccaaagatccggtcaatgcgctgctctccctcggctatacgcttctttcacgggatgtttactccgcatgtgccaatgtcggactcgatccactgttcggctttttccatacgatggagccgggcagaccagctttggcactcgatctgatggaaccgttccgcgccttgattgccgatagcgtagcgatacgtaccttgaatacggaggaactcaccctcggggacttttattggggaaaagacagttgttatttgaaaaaggcaggaagacaaacgtatttcgctgcctatgaaagacggatgaacgagacgctgacgcatccgcaatttgggtataagctcagctatcgccgtatgctggagctggaagcaaggtttttggcccggtatctggatggagagctggtggaatatacgccgctcatgacaaggtaggaaatgaccatgcgacaatttgttctggtaagctatgatattgccgatcaaaaacgttggagaaaagtattcaagctgatgaaggggcaaggcgagcacgtccagtactcggtgtttctgtgccaactcaccgagattcagcaagccaagctaaaggtaagcctggcggagctggttcaccatggagaagaccaggtcatgtttgtaaaaatcggcccagtgacgagagatcaactggacaagcggatatctactgttggcagggagtttctgcctcgcgatttgaccaaatttatctattaaggaatgaagaaagctagttgtaacaaaagtggaaaaagagtaaaataaaggtgtcagtcgcacgctataggccataagtcgacttacatatccgtgcgtgtgcattatgggcccatccacaggtctattcccacggataatcacgactttccactaagctttcgaattttatgatgcgagcatcctctcaggtcaaaaaagccgggggatgctcgaactctttgtgggcgtaggctttccagagttttttaggggaagaggcagccgatggataagaggaatggcgattgaattttggcttgctcgaaaaacgggtctgtaaggcttgcggctgtaggggttgagtgggaaggagttcgaaagcttagtggaaagcttcgtggttagcaccggggagaagtcatttaataaggccactgttaaaagttcgaaagcttagtggaaagcttcgtggttagcacgctaaagtccgtctaaactactgagatcttaaatcggcgctcaaataaaaaacctcgctaatgcgaggtttcagc

SEQ ID NO: 64 - DNA, 12338 bp, Artificial Sequence
  Description of Artificial Sequence: Synthetic polynucleotide
gaagttatgttgataaaatggtttatgaaaacgtgagtctgtggtagtattataaacaatgatggaataaagtgttttttgcgccgcacggcatgaattcaggggttagcttggttttgtgtataaataaatgttctacatatttattttgttttttgcgccgcaaaatgcaactgaaagccgcatctagagcaccctgtagaagacagggttttgagaatagcccgacatagagggcaatagacacggggagaagtcatttaataaggccactgttaaaagttttgagaatagcccgacatagagggcaatagacttttgcttcgtcacggatggacttcacaatggcaacaacgttttgagaatagcccgacatagttatagagatgtataaatataaccgataaacattgactaatttgttgaagtcagtgtttatcggttttttgtgtaaatataggagttgttagaatgatactttttgcctaattttggaactttatgaggatataagatagacttgataaaaaggtaaaagaaaggttaaagagcatggcaggaatagtgacctgtgatgaagatgatggtagaattaaaagtgttcttaaagaaaaacaatattggataaggaaaataattcaatagataaaaaatttagggggaaaaatgaaaatatcaaaagtcgatcataccagaatggcggttgctaaaggtaatcaacacaggagagatgagattagtgggattctctataaggatccgacaaagacaggaagtatagattttgatgaacgattcaaaaaactgaattgttcggcgaagatactttatcatgtattcaatggaattgctgagggaagcaataaatacaaaaatattgttgataaagtaaataacaatttagatagggtcttatttacaggtaagagctatgatcgaaaatctatcatagacatagatactgttcttagaaatgttgagaaaattaatgcatttgatcgaatttcaacagaggaaagagaacaaataattgacgatttgttagaaatacaattgaggaaggggttaaggaaaggaaaagctggattaagagaggtattactaattggtgctggtgtaatagttagaaccgataagaagcaggaaatagctgattttctggagattttagatgaagatttcaataagacgaatcaggctaagaacataaaattgtctattgagaatcaggggttggtggtctcgcctgtatcaaggggagaggaacggatttttgatgtcagtggcgcacaaaagggaaaaagcagcaaaaaagcgcaggagaaagaggcactatctgcatttctgttagattatgctgatcttgataagaatgtcaggtttgagtatttacgtaaaattagaagactgataaatctatatttctatgtcaaaaatgatgatgttatgtctttaactgaaattccggcagaagtgaatctggaaaaagattttgatatctggagagatcacgaacaaagaaaggaagagaatggagattttgttggatgtccggacatacttttggcagatcgtgatgtgaagaaaagtaacagtaagcaggtaaaaattgcagagaggcaattaagggagtcaatacgtgaaaaaaatataaaacgatatagatttagcataaaaacgattgaaaaggatgatggaacatacttttttgcaaataagcagataagtgtattttggattcatcgcattgaaaatgctgtagaacgtatattaggatctattaatgataaaaaactgtatagattacgtttaggatatctaggagaaaaagtatggaaggacatactcaattttctcagcataaaatacattgcagtaggcaaggcagtattcaattttgcaatggatgatctgcaggagaaggatagagatatagaacccggcaagatatcagaaaatgcagtaaatggattgacttcgtttgattatgagcaaataaaggcagatgagatgctgcagagagaagttgctgttaatgtagcattcgcagcaaataatcttgctagagtaactgtagatattccgcaaaatggagaaaaagaggatatccttctttggaataaaagtgacataaaaaaatacaaaaagaattcaaagaaaggtattctgaaatctatacttcagttttttggtggtgcttcaacttggaatatgaaaatgtttgagattgcatatcatgatcagccaggtgattacgaagaaaactacctatatgacattattcagatcatttactcgctcagaaataagagctttcatttcaagacatatgatcatggggataagaattggaatagagaactgataggaaagatgattgagcatgatgctgaaagagtcatttctgttgagagggaaaagtttcattccaataacctgccgatgttttataaagacgctgatctaaagaaaatattggatctcttgtatagcgattatgcaggacgtgcatctcaggttccggcatttaacactgtcttggttcgaaagaactttccggaatttcttaggaaagatatgggctacaaggttcattttaacaatcctgaagtagagaatcagtggcacagtgcggtgtattacctatataaagagatttattacaatctatttttgagagataaagaggtaaagaatcttttttatacttcattaaaaaatataagaagtgaagtttcggacaaaaaacaaaagttagcttcagatgattttgcatccaggtgtgaagaaatagaggatagaagtcttccggaaatttgtcagataataatgacagaatacaatgcgcagaactttggtaatagaaaagttaaatctcagcgtgttattgaaaaaaataaggatattttcagacattataaaatgcttttgataaagactttagcaggtgctttttctctttatttgaagcaggaaagatttgcatttattggtaaggcaacacctataccatacgaaacaaccgatgttaagaattttttgcctgaatggaaatccggaatgtatgcatcgtttgtagaggagataaagaataatcttgatcttcaagaatggtatatcgtcggacgattccttaatgggaggatgctcaatcaattggcaggaagcctgcggtcatacatacagtatgcggaagatatagaacgtcgtgctgcagaaaataggaataagcttttctccaagcctgatgaaaagattgaagcatgtaaaaaagcggtcagagtgcttgatttgtgtataaaaatttcaactagaatatctgcggaatttactgactattttgatagtgaagatgattatgcagattatcttgaaaaatatctcaagtatcaggatgatgccattaaggaattgtcaggatcttcgtatgctgcgttggatcatttttgcaacaaggatgatctgaaatttgatatctatgtaaatgccggacagaagcctatcttacagagaaatatcgtgatggcaaagctttttggaccagataacattttgtctgaagttatggaaaaggtaacagaaagtgccatacgagaatactatgactatctgaagaaagtttcaggatatcgggtaaggggaaaatgtagtacagagaaagaacaggaagatctgctaaagttccaaagattgaaaaacgcagtagaattccgggatgttactgaatatgctgaggttattaatgagcttttaggacagttgataagttggtcatatcttagggagagggatctattatatttccagctgggattccattacatgtgtctgaaaaacaaatctttcaaaccggcagaatatgtggatattcgtagaaataatggtacgattatacataatgcgatactttaccagattgtttcgatgtatattaatggactggatttctatagttgtgataaagaagggaaaacgctcaaaccaattgaaacaggaaagggcgtaggaagtaagataggacaatttataaagtattcccagtatttatacaatgatccgtcatataagcttgagatctataatgcaggattagaagtttttgaaaacattgatgaacatgataatattacagatcttagaaagtatgtggatcattttaagtattatgcatatggtaataaaatgagcctgcttgatctgtatagtgaattcttcgatcgtttctttacatatgatatgaagtatcagaagaatgtagtgaatgtgttggagaatatccttttaaggcattttgtaattttctatccgaagtttggatcaggaaaaaaagatgttggaattagggattgtaaaaaagaaagagctcagattgaaataagtgagcagagcctcacatcggaagacttcatgtttaagcttgacgacaaagcaggagaagaagcaaagaagtttccggcaagggatgaacgttatctccagacaatagccaagttgctctattatcctaacgaaattgaggatatgaacagattcatgaagaaaggagaaacgataaataaaaaagttcagtttaatagaaaaaagaagataaccaggaaacaaaagaataattcatcaaacgaggtattgtcttcaactatgggttatttatttaagaacattaaattgtaaaaaagattcgttgtagataattgataggtaaaagctgaccggagcctttggctccggacagttgtatataagaggatattaatgactgaaaatgatttttgttggaagtcagttttttctgtggaaagcgaaatcgaatatgatgagtatgcatatggcagaagagctgtagaaggcgagaatacatatgattacattactaaggaagaaagaccggaacttaatgacgaatatgtagcgagacgttgcattttcggtaaaaaagcaggaaaaatatccaggtcggattttagtaggataagatctgcgttggatcatgcgatgataaataatacacatacagcatttgccagatttatcactgaaaatctgacgagactcaatcacaaagaacattttctgaatgtgacacgtgcatattctaaacctgattctgaaaaattgatacaaccgagatactggcagtcgcctgtagttccaaaggataaacaaatatattatagcaagaatgcgattaaaaaatggtgtggttacgaagatgatattccgcctcgttctgtgatagttcagatgtgtctattgtgggggactgatcatgaagaggcagatcatatccttcgcagttcaggatacgcggcgcttagtcctgttgtacttcgagatcttatctatatgtattatctggatcatcaggatttgcaaaaaaatgagttgatatgggaagtaaaaaagcagttggatcacttcgatttgacaaatagaaattatgatacaaatccttttgatgtagggggcagcgtaaatgatcatatctgtgaactgagcgagcatatagcgaaggctcattatatttatgagagggctaaggaaggaccattgcaaaatgtaattcgggatattttgggagatacacctgccctttattctgaaatggcatttcctcagctagcatctataaacaggtgtgcttgcaattcgctttcttcatatcaaaaaaatatttttgatactgacatagctatatatgcagatgaaaaggacacaagaggtaaatcagaccgtatccttgttgagggcgcatcttcgaaatggtatgaattgaagaaacgcgatgctaataatgtcaaaatttctgaaaagctgagtatactcaatactattcttaaatttaatagtgttttttgggaagaatgttaccttgatggaaatataaaacaatcgagcggaaagcgatctgaggcaggaaaaattctttatggtcgcgacaacggaaaagaaaatgtcggagtttcaaaattggaattggtgcggtatatgatagctgcaggtcaggaacaaaatctgggaaattacctggtgagttcaggattttggagaaaaaatcatatgctgtcatttatacaaggcaatgatatagcgcttgatgagatggatgaattggatctcttagactatattctgatatatgcatggggatttagggaaaatatcattaaaaagaacagtaatgtgaattctttggatgaaaagactagaaaagtgcagtttccgtttataaagttactcatggcaattgcaagagatatccagatacttatatgttcagcacatgaaaaaacagtcgatgagtcatctcgaaatgcagcaaagaagatagatatattgggaaattatattccttttcagattcatcttcagagaactaaaaaagatggtggaagagtggtaatggatacattgtgtgctgattggattgcggattatgaatggtacattgatcttgagaaaggaacacttggatgagcagtgatgaaaggatatttaaaaaatttttggaaaaaggatcgatttctgagcagaaaaagatgcttttagaagaaaagaaatgttcggataaactaactgcactgcttgggaattactgcataccgatagacaatatttcagagtcagacggaaaaatatatgcggtctataagcttccaaaaaatgttaaacctttgtccgaaatcattaatgatgtatccttttctgattgtacgatgagagtacgtttgcttctcataaagagaattctggaactcgtgtgtgcttttcacgaaaaaaaatggtattgtctcagtatttcaccgggaatgctcatggttgaagattttgatataccgatgggaaatgtcggaaaagtattgatatatgatttcagaaatcctgttccgttcgagtcagtaaatgaaagacataattttaacgtttcaaataaatacacttcaccggagctgctcatccattcaagatatgacgagtcgaaatctgtgagtgaaaaatcagatttgtattctgttgcaaaaattgcggaaacaataataggagattttaacagtattattgcaaatggaaatttgatactacttgcaatgcttagagtttttatcagtacagggaaaagtccggaacctgagtatcggtttgaatcgtcggaaaatatgctttcagtatttgaaaatttgatcaaagaaaattgtttttttgaaaaaaacgattatacatctatgtttcatcaggcgtatgacaatttttttgaatggcaggaatgtttgatatcaccggatcacttggataaaaatatgttcgaggcagctttatcaaatcttgaggatcagctgcttagggttgatattgataagtatagagcagagtacttctataagcttctccgagagttgtctaataaatataaaaatacaattactgatgaacaaaaggtaaggttggcaatacttggaatcagagcgaaaaataatctgggaaaaagttttgatgcattggaaatatatgagtcagtacgtgatttagaaactatgttggaggagatggcagagcttagtcctgtcattgcttcgacatatatggattgctaccgatatgcagatgcgcagaaagtggcggaagaaaacattatcaggcttcataatagtaatattcgtatggagaaaaaaagaatactgcttggaaggtcatatagttcaaaagggtgcagcatggggtttcagcatattcttggtgcggatgagtcatttgaacaggctttatatttctttaacgaaaaggacaatttttggaaagaaatatttgagagcagaaatttagaggacagcgatagacttataaagtctttacgaagcaatacgcatattacgctgtttcattacatgcaatatgcatgtgaaacaaggagaaaggaattatatggagcactttcagacaaatattttataggtaaagaatggacagaaagactcaaagcatatataagcaacaaggatatatggaaaaactattatgagatatatattctgctaaagggtatttattgcttctatccagaagtcatgtgttcgtctgcgttttatgatgaaatccaaaaaatgtacgatcttgaatttgaaaaggaaaaaatgttttacccattgagtctgatagaactgtatcttgctctgatagagataaaagttaatgggagtctgacggagaatgccgagaagttgtttaaacaggcattgacacatgacaatgaagtcaaaaaaggaaatatgaatattcagaccgccatttggtatcgaatatatgcactgtataacgatgtaaaagatgaaactgataagaataaaaggcttttaaaacggcttatgattctttgccgacgatttggttgggcggatatgtatagtgctttggagaaggatgggaagttaattgattttttgagatttgaggtatgttaaatgataacacttgcattagatgaaaatggcaaatttgaagatgctttttctaaaaaaaatgaaaaaccgataatgattgcggggataatctatgatgacaaggggaaagagtatgatgctgagaatgaacgctacaggatatccagttatctgcgagcagtatgtgacagtttgggtgcgaaataccctcaggatctacattcaaatagtaatggaaataaggcgactgttgggaaagtaaaatgtaaaattggtgaaacactaaaggaattcttgagagaaggaacctatgaaaaaaaggaattgccgacaaagaacggttatttaaataagagatctggaaaatatgtaatgtttgcagaactcaggagtagtcagggagttaaaaagcgtgttagtggttggaatgacaatgatctgactcaggatgaaaaggtcagcaatctgtaccttcatatggcagaaaatgccgttgtcagaatgctcttccataatcctatatatgaagatgtaacagatgtaaatctctattttcccacgcgaaaagttgttctgaaagatagagatagagaatacgataaacaagatttcaaaatatatggtgataaggacaagtgcgaagcagaaagcgggagattggtgcattatgatatcgtgtcatcggatttttaccgtacgataatggagaacgaatgtacaagaattaataaaaagcaattaaatgttcattatatgaacacaagcccaatttcgtactgggagaaaaatgaaaaatataatacatttttatatttggctgacatagtttgttctatgctggattattacaaaaagggttcgagtccggcagagtggatggattcttttgccgaatggggaaacaaatattttggtgatgatcagataatcttatttgggtatgatgatatagatgacaaatacatggaggctgtagatgcagtaggacagggagagtattttcatgcgctggatattatatatgatgcggaatgtagtggaagtgaatttgagaagcactacaaagattattggtttccaaagcttataaaaaagatacgaataacagcaactgtggataatttatgcagatcgatctcagatctggagagttttacatatcgaagtaatcttgatcagcagaaacttttgtggatttttgaggaaatcaaagctatcgtcgataagggagattttggaaagaaatatcatacagatcaggttatgtttgatatgtgtaatgccggtattgctgtgtacaatcatatcggagattttgggactgcaaaggaatactatgatgagtgcatgaaacacactggggatgtggatctggtaaagatacttcgtgcatcaaataaaatggtggtctttcttgacgatgcttttaggtatggtgacgcgacagaacgtgccaggaagaatgttgaataccaaaaagctttgcacgatataaagagtgagatttgtccggaaaagaaagatgaagacttgaactatgccatatcgctcagtcaatttggacaggcgcttgcgtgtgaaaaaaattctgatgcagagagtgttttcctagagtcgttgcggcatatgaggaaagggactgccaattatcagattactctttcatatttactccatttttatctggatatgggaatgacagattcttatcgagaaaaaacaaaggactattttggaagtgaaaaaccaaaggaacagctgaaagaattgctgaagttatcgggaaaggatgatagtatagttactttcaaatttgcaatgtatgtctatttacgtgcactttgggtattacaggaaccgcttactgattttatcagaacaagattagaggacatacgtgagactcttgtaaagaagaaaatgagtgaacatatggttggacatccgtgggagttgatttataaatatctggcatttcttttttatcgtgatggaaattgtgaagctgctgaaaaatatattcataaaagtgaagagtgcttggaaacacaaggactgactatagatgcgattattcataatggtaagtatgaatatgcagaattgtcaggtgacgaggagatgatggcaagagagaaagcgtactttgatgaaaaagggatagatagaaaaaatgtttgtacttttatgtatcattgatgtttaataagatttgaccgaggagtgacaggtaatcgccggtatatctggtattacctgtcattttttgatgaaataagctactttttgcctaaaaaacgaaactgttggtgttttatgatgattgtgtcaacaaaagagagcaaaagaagaggagaaaagtaatgtcaatgatttcatgtccgaattgtggtggagagatatctgaaaggtcaaagaaatgtgttcattgtggatatgtgttagtcgaagaagctaaagtagtgtgcacagaatgtggaactgaggtagagagtggcgctgctgtatgtccgaagtgcggctgtcctgtaaatgatagtgagacgcctcagaaagttgaagtgactagggtaaatgtatcttccgtaatcagcaaaaaagtcgttgtaagcatactgatcgcagtgattacaattgcaggttttttctatggagtgaagtattcgcaggaaaagaaagcaattgaagagtcagtaaagcagaaggaagactatcaaagtacgctagagcttgcttcgctaatgatgcttcaaggagcttcggatgcagaaacttgtgggaatttggttaggaaagtgtggagcaactgcatttataaggagagggatgaagaaaccgacaagtatacgtgtgatagcaggggtgcaggatggttttatgatgattttaatgatgcattaatggctctttacagtgacagcagttttggcaagaagataaatgaaatcaaaaacggtcaggaaaccgttgcggcgatgatgaaagatctgaaaaatccgccggatgagatggcagatgcctatgaggatattcaaaatttttatgtgtcctatctaacgctgacagaaatggttgtgaatccaactggaagtttgagttctttttcatctgatttttccgatgcggatacggaggtgtccaatgcctatagccggatgaagttgtatttagattaaactattgaggaaaaaatggaggtgctttaatgcgggggagaaactgtggagggtcatcaggcgacggactgctggtacttctcgtactgcttgtccttttttataaaatcatgccattcataggtttatggattttaatttttggtgatgctgaacgtaaagatctgggtatgggtatgattattgtcgggatagttctatatgtattattagaggttttttaatgtgagtttctgtggtaaactataaaagtacaagcttttgcgccgcaccgcataaatagcggatttatgaccattatttggtgaaaaaaatggtgtacacctgtgtttttttgttttgcgccgcaaaatgcgccacggaaccgcatgcagagcaccctgcaagagacagggttatgaaaacagcccgacatagagggcaatagacacggggagaagtcatttaataaggccactgttaaaagttatgaaaacagcccgacatagagggcaatagacataaagaccaaaaacaggtcatctgcatactgtgttatgaaaacagcccgatatagagggtgtgagagatatagttctcgtcacagtgcagaaaatgacctattatgtgccgaaaaacaaaatgaaaaaagaatggaaaggcgtatttaatgaaatgctgatctgttgatttgaattaacaaaaaaaggtcgccccacggatgacaaaaacatccgggggcgaccctttt

SEQ ID NO: 65 - DNA, 6098 bp, Artificial Sequence
  Description of Artificial Sequence: Synthetic polynucleotide
tactgtgtgcataagtcttccttagatccataggtacagcagttttatttattagccttagaaaatggaaaatagagcttataaatgatatgatatttatgaataaaatgattgcattctcgtgcaaactttaaatatattgattatatcctttacattggttgttttaattactattattaagtaggaatacgatatacctctaaatgaaagaggactaaaacccgccaaaagtatcagaaaatgttattgcagtaagagactacctctatatgaaagaggactaaaacttttaacagtggccttattaaatgacttctgtaagagactacctctatatgaaagaggactaaaacgtctaatgtggataagtataaaaacgcttatccatcatttaggtgttttatttttttgtgattatatgtacaatagaagagagaaaaaaatcattgaggtgaaaactatgagaattactaaagtagaggttgatagaaaaaaagtactaatttctagggataaaaacgggggcaagttagtttatgaaaatgaaatgcaagataatacagaacaaatcatgcatcacaaaaaaagttctttttacaaaagtgtggtaaacaaaactatttgtcgtcctgaacaaaaacaaatgaaaaaattagttcatggattattacaagaaaatagtcaagaaaaaataaaagtttcagatgtcactaaacttaatatctcaaatttcttaaatcatcgtttcaaaaaaagtttatattattttcctgaaaatagtcctgacaaaagcgaagaatacagaatagaaataaatctctcccaattgttagaagatagcttaaaaaaacagcaagggacatttatatgttgggaatcttttagcaaagacatggaattatacattaattgggcggaaaattatatttcatcaaaaacgaagctaataaaaaaatccattcgaaacaatagaattcaatctactgaatcaagaagtggacaactaatggatagatatatgaaagacattttaaataaaaacaaacctttcgatatccaatcagttagcgaaaagtaccaacttgaaaaattgactagtgctttaaaagctacttttaaagaagcgaagaaaaacgacaaagagattaactataagcttaagtccactctccaaaaccatgaaagacaaataatagaagaattgaaggaaaattccgaactgaaccaatttaatatagaaataagaaaacatcttgaaacttattttcctattaagaaaacaaacagaaaagttggagatataaggaatttagaaataggagaaatccaaaaaatagtaaatcatcggttgaaaaataaaatagttcaacgcattctccaagaagggaaattagcttcttatgagattgaatcaacagttaactctaattccttacaaaaaattaaaattgaagaagcatttgccttaaagtttatcaatgcttgtttatttgcttctaacaatttaaggaatatggtatatcctgtttgcaaaaaggatatattaatgataggtgaatttaaaaatagttttaaagaaataaaacacaaaaaattcattcgtcaatggtcgcaattcttctctcaagaaataactgttgatgacattgaattagcttcatgggggctgagaggagccattgcaccaataagaaatgaaataattcatttaaagaagcatagctggaaaaaattttttaataaccctactttcaaagtgaaaaaaagtaaaataataaatgggaaaacgaaagatgttacatctgaattcctttataaagaaactttatttaaggattatttctatagtgagttagattctgttccagaattgattattaataaaatggaaagtagcaaaattttagattattattccagtgaccagcttaaccaagtttttacaattccgaatttcgaattatctttactgacttcggccgttccctttgcacctagctttaaacgagtttatttgaaaggctttgattatcagaatcaagatgaagcacaaccggattataatcttaaattaaatatctataacgaaaaagcctttaattcggaggcatttcaggcgcaatattcattatttaaaatggtttattatcaagtctttttaccgcaattcactacaaataacgatttatttaagtcaagtgtggattttattttaacattaaacaaagaacggaaaggttacgccaaagcatttcaagatattcgaaagatgaataaagatgaaaagccctcagaatatatgagttacattcagagtcaattaatgctctatcaaaaaaagcaagaagaaaaagagaaaattaatcattttgaaaaatttataaatcaagtgtttattaaaggtttcaattcttttatagaaaagaatagattaacctatatttgccatccaaccaaaaacacagtgccagaaaatgataatatagaaatacctttccacacggatatggatgattccaatattgcattttggcttatgtgtaaattattagatgctaaacaacttagcgaattacgtaatgaaatgataaaattcagttgttccttacaatcaactgaagaaataagcacatttaccaaggcgcgagaagtgattggtttagctcttttaaatggcgaaaaaggatgtaatgattggaaagaactttttgatgataaagaagcttggaaaaagaacatgtccttatatgtttccgaggaattgcttcaatcattgccgtacacacaagaagatggtcaaacacctgtaattaatcgaagtatcgatttagtaaaaaaatacggtacagaaacaatactagagaaattattttcctcctcagatgattataaagtttcagctaaagatatcgcaaaattacatgaatatgatgtaacggagaaaatagcacagcaagagagtctacataagcaatggatagaaaagcccggtttagcccgtgactcagcatggacaaaaaaataccaaaatgtgattaatgatattagtaattaccaatgggctaagacaaaggtcgaattaacacaagtaaggcatcttcatcaattaactattgatttgctttcaaggttagcaggatatatgtctatcgctgaccgtgatttccagttttctagtaattatattttagaaagagagaactctgagtatagagttacaagttggatattattaagtgaaaataaaaataaaaataaatataacgactacgaattgtataatctaaaaaatgcctctataaaagtatcatcaaaaaatgatccccagttaaaagttgatcttaagcaattacgattaaccttagagtacttagaactttttgataaccgattgaaagaaaaacgaaataacatttcacattttaattaccttaacggacagttagggaactctattttagaattatttgacgatgctcgagatgtactttcctatgatcgtaaactaaagaatgcggtgtctaaatctttgaaagaaattttaagctctcatggaatggaagtgacatttaaaccactatatcaaaccaatcatcatttaaaaattgataaactccaacctaaaaaaatacaccacttaggtgaaaaaagtactgtttcttcaaatcaagtttctaatgaatactgtcaactagtaagaacgctattaacgatgaagtaattcttttaaagcacattaattacctctaaatgaaaagaggactaaaactgaaagaggactaaaacaccagatgtggataactatattagtggctattaaaaattcgtcgatattagagaggaaactttagatgaagatgaaatggaaattaaaagaaaatgacgttcgcaaaggggtggtggtcattgagtaaaattgacatcggagaagtaacccactttttacaaggtctaaagaaaagtaacgaaaacgcccgaaaaatgatagaagacattcaatcggctgtcaaagcctacgctgatgatacaactttaaaaggaaaagcagtggattcttcacaaagatactttgatgaaacgtatactgttatttgtaaaagtatcatagaagcattagatgaaagcgaagagagattacaacaatatattcatgattttggagatcaagtggattcttcacctaacgcacgaattgatgcggaattactacaagaagcaatgagtaggttagctgacataaagcggaagcaagaagcacttatgcaatccttatcttcttctacagcaacgctttacgaaggcaagcaacaagcgttacacactcaattcacggatgcgctggagcaagaaaaaatattggaacgctatattacttttgaacaaactcacgggaatttttttgactcatttggagaacttgtctatcgaacgggacaagcagtgcgtgaattagctaataacgtcacattcgagagccaaacaggaagctatcattttgataaaatagatgcttctagattccaaactttgcaagaaatgttgccaaaggcaaagaaaaaagcatttaattttaatgactaccaaataacatggaatggcaccacgcaccttttatggaaaaatggtaaagtggatgcagaagcaaccaaagcttataacgaggcgaaactgaatggaaagctaccaaaggaaggtaatgtagcaacacaagatgcagaactattaaaaggcattttggcttcactgaaaaacaagaaagatcctatcactggagcagatataagcagtgtgcatgtattatctatccttagcgggctcgcattctcctatacagctgggaattataagggaagaaaacttactgttccaaaaagtttcttagacaaattaaagaaaaaccgaaaatctaaagtacctaaactatctagtttatcagaaaaacaacaactaaaactcgcaaataaatacaagaaaaaatcacctattccaattccagatgatgctaaaatcaaagctcagacgaaaaaggctggttatgaacaaatatcttataaatggaaagagaatgggataacctttgaagttagatggcatactaggacaccaggtgcaccaaaggaacaaggaaatacgtttgttatagaaagaaaaattcagggtacagcagaagggaaaacaaaagttcaacaaatattggttggagataataagtgggtgagtaaaagtgagtggcaaaaggctataactgataagaaaaatggtgtaagtacctcggagcaaaataaaatgttgtctgatggacattggaaagaatagaaaggagcaaaatgatggaagattattataaaggttttgagggatatccagagatagatttttatacgtatatagatgatatgaaattgggtatagcaatgtgggaaggatactttgacaacattatgaaagaaattaatccaagtaacggaagatggacttcattagcgtattattatcatttagatgaggggtggtatgatgaaagtccttgggaaataccaagtaatacagaagcattagaattattggaaacaatccatatatctaatctagatactatcacacaagagatattacttaaattaataaatttattaaagaagaatataaatagacaagtttatattgaatactcataaaaaagatgattatgatatattatagaacaaacgaacaagccccaaatacgaggtttgttcgtttgttttcaatataattatttgccaccaagtgagatattacggttttaaatagcttatttgacgataccaaaccctgataagagaaagaagaaagagaaagctggtgtagttgttttaagtgaactagataaaaaattaatagcaaaacttgaaaaagatggtgtgaaaatatcaaaagaagatgttataggaataaaataattgccagatgatgagaaatcgtttggctggaaaaaggaaatccatccgctggatttgagcatattcttattgaacatggtgaacaatttgctaaatagggaatttcaaaagctgagttacctgattttttgatgactgctttagaaaaggaaa

SEQ ID NO: 66 - DNA, 6222 bp, Artificial Sequence
  Description of Artificial Sequence: Synthetic polynucleotide
attctttaaaaatatctaataatttatttactatatactctaatacatcttttaacctatctaaaacatcatcacctacaacatcccaaaaatcatctaaaaagttaaaaaaatccatctttatcaactcctatatctattttttattgtgtaattcctgagttacaaaaccattataacacgtattacacacgtagtcaatacttcaaaaaaattttttgtatatttttttgaataagtaaataaaaagagctgtgtagctctttattaaaatcaatatttttattttgttaacaaacttagacaacattaaatttagaaacctatatatatttcagtacttttcatttttaggtagtctaaatcagaaatggttttgtctaaatgatgtatgtaagttttagtccccttcgtttttagggtagtctaaatcagaagtcatttaataaggccactgttaaaagttttagtccccttcgtttttagggtagtctaaatcccatccaaattatgggataatatgttactttttattttaatatttgattatttattgtttttttactgatttagattacccctttaatttattttaccatatttttctcataatgcaaactaatattccaaaatttttgtttcttttcttatgatcttttctccgatagttatttctccagataagattttcatttttttgaattgatcttctgttagaattaatgttcttactgatgaattttctggaactatcattgacaactgattttcataggaaattattttttcttttgtgctagaacttacaatgtatactgatttttgtacctgataatatccttttcttataatttcttttctaaattttgcatattcttttttttcttttcctgtttgcattggaaaatcatacattagaatccctacataattagtactcataatcctctatccttaactcaggaatttctacttctgacatttctcctgtaaaataatttctaatattatctaaaaaataatcaatcacttgagccaattcatattttttatttttccaataaactttttgtgttaataccaataacaatttttgtcttaatgatttattcaaacttacttcttcctgttgattaaaatatacgatataatctaccattggacgaaatatttcaataatatcatctgcaaaattataattattaaattgtgaactgtgatgtattcccaaacttggatgaaatcctttagccacaatttttgaagagattaagcttctcaaaaccatatacccataatttaatgccgaatttgtcccgtcttcaccaaatctcttaaattttttcccaaaaagttcaccaaaatacattcttgcagcaattgcttcctgatgttccgcttcttttccttttaatctaatattattttcatatgcttccaacttatatgatacttcctgagattttttcaaaaactgcaataaatttctttgattttctatttttctcattacaatttttctccagatttcttcttttttatcgtcaatccagctcacttgctcattaattcttgttgttacttgaaaatgattatacagtcctaatgaatgtaaaactggctgatgtttttcattacaaattatcagtggaatattatgttctgataatcttaactgtaatattccgctaattttacatctgcaattttcaactacaattgccatgatatcatttaaagatactttatcagccttattttcatcatcttcatttatcatcacaagctggttatttaaaactgataattcattgactcttgttacatggataatattagacatttttattactcctttactctaaagctttatattcaaacataactttcacaagttcacacaattcttctgaatttctatcagtcattaattttttcttttttaaatttttcaaatgtacaattttttccgattctaaagtctgaatttctattttcttatctgctcctattttaaatgttgctacaaaaccatattcctttaatatatccactattgatttcataattgcatttttaagttttctatcataagaaagtaattttcttaaattttccagcacttctaaaagtgaaatttcagcatgcggaatatagttaaaatgtgcaatatagtttcgtatatacaaatcttttttctcttgttttaatttttttacttttttatcagaatagatgcttcttttttctacattatctttgtataattctttataaaaatttatatatttttcaacaatttgcccacttttatattttacatttttactgttatcaaaattaaatatttcttcaatataatgattttcaggaaattcacctttcaatctaaatcttaagtccctttcccagatcgaagtatatcccacaagtctgtggagtatttttaataacaagccttgcaacaagtttaattcattaaattccactttatttttcaaatgagtatatttttgtatatttccaattgctttttcatattctttataatcttcatcattaaatttttcatcttttttaggtcttgcatattttctatgtaaattttgctgcattgtataatttttttctatttcattttttttattgctgtattctttcaattcttttaaacttattttatacttcgctttatcagctattttttcaagtaaatttaacatcccatatttttttatattataaaaagctctatgctttataatattttctccatcaaaatatattttatttgtgtcaaatttcttcaattctttcctatcttttattttattttcattaaaatctaaaaattttccaatttcattcgcttctaattcaaaatcttctgttactctattattatctaaatttaaaagatttataagttcaagttcatctgaaaaagtttcttctttatttgcactctgatatttttcaagacttcccttcaaattagtcaattctttatgattaagcaattttaaaattaaataaaacatattcaaattttcagtgtattttaatatctttcctaattttatctctcttacaaattcatttatttcatgtggaatttctttattcctattatgtttttcataattttttaaaattttatcatatttttctttattatctttttttatttttattttagaaaatatatcattattatcattgttattattactttctatatattttaaattatttttattcaaataatctataaaaccttttaaaaatatttgttgtataaaatcaatgtatgtatttttttcttctttatcttgattattaatcatctccctactttgtataatagcaagatattctactggtacagttttttctatattttcaaatttttgatatttataatgtcctgttttttgatttctttgtttatttatttttattacttcattagttattttaaaaaaaactttactatttttaacaaatttattaagaaattcaccataataaatatttttcaaaagatatatttgagcatctttttcttctttatccttaggaacactccaaaaaaattttaaagtatttcttaaatcttctattttattatataatttcgtaaaagaaggaacaaaaggaatattcttatttacaaaattaaattttgtattttttaaatatttaattatcacatccttttcataataattaaatacatttgcactatttaactgcttaaatatcttcaatttcaattttttctcatttatttcattttgaaacattttttttgaaatttcagaaggagctatatttttaaatgcaaatatatctttcccttctaattccaaattaaaatgcacaatcccatgtctaatactgctaatagcttcatcaatatttgcaaaaaaatcttctatctcatttttattatccatattaaaatcataactatagaacatttttaaattttcttttacttcattttgcttgttttcattatatattttatcaacttctccagaaacatatttttcttcgcccttattattttttacagtttttcctctcattctacctgtaatatcattctcattttcagtttcaagaatatttctcaatgaaaaatatgcaaccgaagaaactccaattatatttcgtaaaaatgcttcattttgtctattcctagcaataaaatcacttgttgcaatctctccaacttgtaaataataattgtatttcccacaatttcttacataagtatccaatttatttagtaatttgttttcaattaatttttttaaattttgatattcaaatattctcttaattttatcgttacttatgttactcagtcttttatacacataatttttcaaaagctgactcatttcaatttccacaaaatgacaaaaagcatattttatatttttatcattaagttcttctttatccaaataatatttataaaacacttgtgatttttttaattcactcatatccggaattttttcaattaattcttttatattatttacattttgtatttcttcgtaaataattttagcaaaattttctttatcattttttcttccaattattttgtgatagtattctcttattttatatttttcatgtttttttgaattttctattaaaaaaaataacttctcaatatcttcttttttatacaatttatcaaatgcttcctgtacattatttatataatcattacgctttgctgattctctataataatcataaataatatttcttttgctcttccctccaactttttcaacattattttcattaattttctgataattagccttattttcttcaaatgaatattttaaagaatttatcttattcaattttgcctcaacatcttttctaaatatttctaattcttcagagttcacatcttcatttaacaatattttctttaaaactgaaaaactatttttattttttaaatcatattctgaaatatcttcttcagaataatttttatcctgtactgcatttttctctttcctattctttaaatacagaacactatcttttagatgcaatactttatttgaaaaaaacttttttaaattttctcttcttattctattttcttcttcacttgcattatcaggattttttatatatatatccagtcttatacttaaaagctctgacaatctctcactagtcctattttcttcgctcgtactttttactaattttccctcttcaatatattttttatgcgaaattccatcaacttttgtaactttcatatataaaaacctcctaatatctatattttttactcaatacctaattcttttttcaatgctttttgtaaaatttgtgaaaaattcagatttttttcctgtgccaatatatctaaccaaacaggaattgttaaagttttctttttaagtgcatttgtaacttttgccacttcatacactggatcaacagataaaatatacaaatactgattttctttcagtttcacatcctccacttttgaaggctcaggaaatttttttcttacatccaaaaaatcagccaaatgcagacccaatgtctctctcaaattggaaacagcctcctccatgctatctccaaatgtagcataataatttatctctccatcttcaaacttatcaaaatcaacaatacaaccataataagtcccatcttccttagttaccactgctggataaaatacatccattttaattatctccaatctataccacgtgttaaatacgtgtttaaaaatatttataaaattttttagcatctctgctaaaataaaacaattatttcaaatttttctattccttaatcactcattgttagtgattctttttttacttggacaatttttcatttaatttcttcaatttttttaaaatcacatttttttaatattccttatttaattgcaaattttcattacttttggggtgctctaaatcccatccaaattatgggataataatttttagtgaaagcaagaagggactagaatttaatcccaacttgtttttcaatacttcttaatgttcctacaggtatatcttttgaatatggtactgtgaccacaccttccacacctgggatcatccattgataatgactacctcttatacgcacaacttttccgcctaattttctaaatcttttttcgat

SEQ ID NO: 67 - DNA, 6337 bp, Artificial Sequence
  Description of Artificial Sequence: Synthetic polynucleotide
ctttctatctttttcaaataaaattaggctctagttagcctaatcgcataattatttattatagtataattcttattttttttcaacctaaaaatttaaaacatctccaaaaattttcgtttcagaacaaccaagcaaccatattcaaaaaacaataaaaaatgagcaagaattgaaattttattctcactcagaagttatttttattaaatatcacttttcgatattggggtggtctatatcaatttaaaagacagaatagataattctttagagttttagtccccttcgatattggggtggtctatatcagaagtcatttaataaggccactgttaaaagttttagtccccttcgatattggggtggtctatatcccatcctaatttcttgctgatgagatatttatttctaatttttctattttgtctttattttcaatactttcaatcctatttttctctttattaataatatagaaccaccctatactattataccatattttttgatttttcaaaattccaatattttgttttgtgaaattttttctcccattgtcacttctcctgcaagtaccttcattttttgaaactgatcttctgtcaggataatggaacggattgatgaattttctggagcgagcattgataactgtttttctgccagttcgattttttcttttgttttcgacctcattatatataccgatttttgaagctgataatatcccttttctatcaattttttcctaaaagtcctatattcaaatctctcaacatctgtctgcataggaaaatcatacataagcagaccaaaatactcaatactcatagtccatcacgctcaatgtcggaattatcacttcttcatcttttacaaaataatttcgtatactatccaaataatagtctaccgcttggaaaaaatcatatttcttattgttaaataataccttctgctgtgctacaagaagtattttttgccttatttccttacttaatttcacttcattcaaaatatccttgtacatataaacaagataatccaccataggacgaaaaacctctattatatcatcagaaaaattataggcattaaactgtgacttatgatgtaatcctaaacttggatgaaatccttttgctacaatctttgatgatattatagctcttaaaatcatatatccataattaagtgcagaattcactccatcttcatcaaatcttttaaaactattactatacaattcctgaaaatatatccttgaagctattgcttcctgatgttctgcactcgcatcatcttttttcaagttttccttatatgttttcagtctttcaatggaaatatcacttttttcaagatactctaacaatgctctttgattttcaatcttattctccactatcctgctccacaatttttcctttttctctttttcccactcaatctgctcatttattcgtaaagtcacttgaaaatgattaaataatcccagcgaatgaatttcaggctgatgtttctcgttgcaaataataatcggaatgttattttccaccagcctcaactgcaaaatcgcactaatcttacaatagcagttttcaataactatcgcagatatatcattcaaagaaatcttatttttctcatcattattgtcttcatcaaccattataagctgattattcgatattgacaaatcatcagcccttgttatgtgaattatattgggcattttaatcatactccttataaatttcattcttataacgtatcattcgtattttctatttttgttaaaagttctattatcaagtttttaatataatcagaattataactttctaattctaaaacagaaacttttttaggtttcattaatctttcaagtatatcattattaccgataagtttaaattttttctttaattcatcataatctaaattcacatcttttttaaatacttcaaatacacttgcataagttgaattattataacgtgtactatatgataataaattagaaactctatcaatttgttctgcaatactgtaatcagcaaacggatttcttacaatatagaaatgtgaaatatagtttctaatactttcattttccggcttattaatttcagaattttcagacaaatcaattccaaatccataacatattttctcaaattttttataagattcttcatcaaaaaatttatagtatgctgttgttgtataaaagccatcagatccattacgcttaggataagctctacttattccagtattgtagccacttaacttaataattcctaattctcttagcccatttacaatatagtgcatatctctttcaaatctagccatttgaatagcaagtttccaatttatatctatcaaataactttctattttattcaaataattaaattctaccaaatctctaatttttttgtattcagaaactctattataatctttttcaaatgatttatagtttttattttgtatattttttgcaaaaaagtcatcattttctttcaatttttttatatacttctctttgtattctttagaatatccatttagtttatcatttagatttttcaatattgcatcaatttcagatattttattttttctaatatttttaccatcaatattaaataaaaattttgcatcagccattttaatatcatttgaaattaatccataaattttatcaaaatttggatttccaatatttaaaaataaattctttttataaatatataattcattcttacgttctttaggataatatatttcttgaaatttattttcattctctgattccatatcttctattaaattatctatttcttttttgtatttttttaaaaaatcagaattaaatattattctacacaatattttactctttatttcctgatctttatcttttatatactgatcaaccttttttttcaaatcctttttatttatgtttgataactttctttgttcatcttgtaatatattcgattttttatctatctcaaatttagtttcatcatcaaaaattacaattttttctaattttttctctaaaacatcacaaccattaatatcatctttaaattcagttaatatattattttttatatcctcataataattattaaaaatttcttttttagtttgtattttaaaatcatcaaagtctttttctatctctttcattttttgaataaattcttctaaattaagattccaattttcagttatacattcatttctcaaagtatttaattgcattatttcatctaaaatatctataatattttgatattctgaagtatttaaccaaactgatgttgcaaaaaatctatttctaattttatttataaccgcattactatttaacagtgcaaatattgaaattatatattcaaaatcatcatttattactatagttttatcactagtctttacagttattctttcgtaagttttattatcattaatgtcttttatttgtttcttaatttcttgaatattcattttaaaatctgaaaaatcaaaaagttcctcataattttttctcaaatatccaatataacattctattacttttttctgatattttttaatagctttattattaccttttgaagcagaaatctgagcatttttataataattttctataatattttcatctatttcatcaatgtttcctaaagttttctttaattcttgtaaaaatatattcttactttcattttcttctaaatcatcttctaaaattaatttcttatacaattctttattcacatatattaaagcatttaatactattttttctgtttctatagtatcaaatggttcattcttaggattattcctatataaatttaatatttcaggaagtactttagaaaaggatggtaaatatttaatatcattattattttcttctgaaattttaatatcatttattttagtaattatattttttttatctttaaatactacatctaaatttaatgcttttgacacttcttcatctgatatttttaaattttgaattatatttatgactttattatagtcatcttgcgttccttgtaaatctctttccttgctaatcgcatgtaatatcctgtttctttcatttgttcctatctttgtaaatttcctaataaaattatttgtaatgttatttttattatctataaaatctaagtctcttattatttttatttttgaatttaaaatttttttatcaagtacgtaatttttttctcgatctcctccaaagaaatctatattttcatcattatttatattttctctagaaaaaatcttatttaattccatattggtagaagcaaaaaaagtaatcaattctaaatccaattcctctttagcgtgaagtctagaaaaatcatcagtatttactgttgtcatatctatatcattatgtcttaatttccctaaatacataatatgctctaacgtatattgcttaactctttttaaaattttttcagataatatactttcatttaaaattttttctatttctattttttccattttctttaatctgactttttgttcatttaccaatattttttcaattcttcctttcaaatatcgatatatgattttatatagttctttttcttcatcagatttctttgaaaattttttcgaatcaaaattaactttataatgttttttaaatattccaaaaatttctgtatcacaatttcctttttttagttctttttctaatttttttattaattcatctattttaaattctgctaaaattttttctattttttcttttatactattattttttatattttctacaaaaaattttacaattttatcttttttattttctctttctattttaaatttttcgtgcttatctaatagtacataagattttatatatgttctatttcttctcttttcaagaaattcattattaactttttttactttttcaattcttttagtaatattccaaaattctaactcttttataacaaaatcagctatatcttctactgttaaatctacatttatatttaaaattttttcaacaagcatttttttatttttagatttctttttatcaccaccaacattaagataaaattttacaaaacccagaatttctaaattactttttattttttctcttatttccataaaattagtcaaaataacatctattttatcatctttcaataatttttctcttaaatgttcttcataatatcgattttcaaatactttttctgtttcattttcaattattttttctataatcttatataaactcatgttaatatttttaaaaatttcgtaaattgatttttttgtttctaattcatcattttctattattcttaatattattgaacaatcatttagtgttttattagtatactcatctctgatatctatctctatttcttcttcattctcttgtctctttatttctatttttttatcatctttagttattccttgcctaattgcttcatctattattttcttttttgtaatccccaatgctttcaatttctcagattttccatatgcttctatatataatacaacttcttctgtttccaaaaaatcatcattattttctattcttatgattccttctttacctttcaacttaaatagaatatttcctgcatgaaattttcttgtaaattctttaagaatattatcattttttttgtaattaatatattttctaataaatttattattatcaattttttctttattattattttcattaatatttaaaatgtatttgtttccatcatagttccttttaacttttactttccgttttattttaaaatcttttttatcacgaacttcataccatctcttatgtccaaataaatttcccattccaatctcctcgtttctactttaatctaataaaatatttttaaattaaatcaattttacatctttctaatcaaaaatacaattttccatttttagtataccacatcaatattaaatctcaaaaaaataaggagccgtcaaacatagctccctacttctatttactcataatccccatctatccttacttttcgtaaaatcaatccttctttcgcctttagatccaacttaattttcccatttgaacctgttctaaatgttctgccttctgttaccaaatcaataaatctttcatcctgataatttgtttcaaattccacattttcccagctgttaaacgaattatttattacaacaataattaaatgatcctcgattactctttcatacacaattattt

SEQ ID NO: 68 - protein, 1477 aa, Artificial Sequence
  Description of Artificial Sequence: Synthetic polypeptide
MSNFFKNFTNLYELSKTLRFELKPVGDTLTNMKDHLEYDEKLQTFLKDQNIDDAYQALKPQFDEIHEEFITDSLESKKAKEIDFSEYLDLFQEKKELNDSEKKLRNKIGETFNKAGEKWKKEKYPQYEWKKGSKIANGADILSCQDMLQFIKYKNPEDEKIKNYIDDTLKGFFTYFGGFNQNRANYYETKKEASTAVATRIVHENLPKFCDNVIQFKHIIKRKKDGTVEKTERKTEYLNAYQYLKNNNKITQIKDAETEKMIESTPIAEKIFDVYYFSSCLSQKQIEEYNRIIGHYNLLINLYNQAKRSEGKHLSANEKKYKDLPKFKTLYKQIGCGKKKDLFYTIKCDTEEEANKSRNEGKESHSVEEIINKAQEAINKYFKSNNDCENINTVPDFINYILTKENYEGVYWSKAAMNTISDKYFANYHDLQDRLKEAKVFQKADKKSEDDIKIPEAIELSGLFGVLDSLADWQTTLFKSSILSNEDKLKIITDSQTPSEALLKMIFNDIEKNMESFLKETNDIITLKKYKGNKEGTEKIKQWFDYTLAINRMLKYFLVKENKIKGNSLDTNISEALKTLIYSDDAEWFKWYDALRNYLTQKPQDEAKENKLKLNFDNPSLAGGWDVNKECSNFCVILKDKNEKKYLAIMKKGENTLFQKEWTEGRGKNLTKKSNPLFEINNCEILSKMEYDFWADVSKMIPKCSTQLKAVVNHFKQSDNEFIFPIGYKVTSGEKFREECKISKQDFELNNKVFNKNELSVTAMRYDLSSTQEKQYIKAFQKEYWELLFKQEKRDTKLTNNEIFNEWINFCNKKYSELLSWERKYKDALTNWINFCKYFLSKYPKTTLFNYSFKESENYNSLDEFYRDVDICSYKLNINTTINKSILDRLVEEGKLYLFEIKNQDSNDGKSIGHKNNLHTIYWNAIFENFDNRPKLNGEAEIFYRKAISKDKLGIVKGKKTKNGTEIIKNYRFSKEKFILHVPITLNFCSNNEYVNDIVNTKFYNFSNLHFLGIDRGEKHLAYYSLVNKNGEIVDQGTLNLPFTDKDGNQRSIKKEKYFYNKQEDKWEAKEVDCWNYNDLLDAMASNRDMARKNWQRIGTIKEAKNGYVSLVIRKIADLAVNNERPAFIVLEDLNTGFKRSRQKIDKSVYQKFELALAKKLNFLVDKNAKRDEIGSPTKALQLTPPVNNYGDIENKKQAGIMLYTRANYTSQTDPATGWRKTIYLKAGPEETTYKKDGKIKNKSVKDQIIETFTDIGFDGKDYYFEYDKGEFVDEKTGEIKPKKWRLYSGENGKSLDRFRGEREKDKYEWKIDKIDIVKILDDLFVNFDKNISLLKQLKEGVELTRNNEHGTGESLRFAINLIQQIRNTGNNERDNDFILSPVRDENGKHFDSREYWDKETKGEKISMPSSGDANGAFNIARKGIIMNAHILANSDSKDLSLFVSDEEWDLHLNNKTEWKKQLNIFSSRKAMAKRKK

SEQ ID NO: 69 - protein, 1403 aa, Artificial Sequence
  Description of Artificial Sequence: Synthetic polypeptide
MLFFMSTDITNKPREKGVFDNFTNLYEFSKTLTFGLIPLKWDDNKKMIVEDEDFSVLRKYGVIEEDKRIAESIKIAKFYLNILHRELIGKVLGSLKFEKKNLENYDRLLGEIEKNNKNENISEDKKKEIRKNFKKELSIAQDILLKKVGEVFESNGSGILSSKNCLDELTKRFTRQEVDKLRRENKDIGVEYPDVAYREKDGKEETKSFFAMDVGYLDDFHKNRKQLYSVKGKKNSLGRRILDNFEIFCKNKKLYEKYKNLDIDFSEIERNFNLTLEKVFDFDNYNERLTQEGLDEYAKILGGESNKQERTANIHGLNQIINLYIQKKQSEQKAEQKETGKKKIKFNKKDYPTFTCLQKQILSQVFRKEIIIESDRDLIRELKFFVEESKEKVDKARGIIEFLLNHEENDIDLAMVYLPKSKINSFVYKVFKEPQDFLSVFQDGASNLDFVSFDKIKTHLENNKLTYKIFFKTLIKENHDFESFLILLQQEIDLLIDGGETVTLGGKKESITSLDEKKNRLKEKLGWFEGKVRENEKMKDEEEGEFCSTVLAYSQAVLNITKRAEIFWLNEKQDAKVGEDNKDMIFYKKFDEFADDGFAPFFYFDKFGNYLKRRSRNTTKEIKLHFGNDDLLEGWDMNKEPEYWSFILRDRNQYYLGIGKKDGEIFHKKLGNSVEAVKEAYELENEADFYEKIDYKQLNIDRFEGIAFPKKTKTEEAFRQVCKKRADEFLGGDTYEFKILLAIKKEYDDFKARRQKEKDWDSKFSKEKMSKLIEYYITCLGKRDDWKRFNLNFRQPKEYEDRSDFVRHIQRQAYWIDPRKVSKDYVDKKVAEGEMFLFKVHNKDFYDFERKSEDKKNHTANLFTQYLLELFSCENIKNIKSKDLIESIFELDGKAEIRFRPKTDDVKLKIYQKKGKDVTYADKRDGNKEKEVIQHRRFAKDALTLHLKIRLNFGKHVNLFDFNKLVNTELFAKVPVKILGMDRGENNLIYYCFLDEHGEIENGKCGSLNRVGEQIITLEDDKKVKEPVDYFQLLVDREGQRDWEQKNWQKMTRIKDLKKAYLGNVVSWISKEMLSGIKEGVVTIGVLEDLNSNFKRTRFFRERQVYQGFEKALVNKLGYLVDKKYDNYRNVYQFAPIVDSVEEMEKNKQIGTLVYVPASYTSKICPHPKCGWRERLYMKNSASKEKIVGLLKSDGIKISYDQKNDRFYFEYQWEQEHKSDGKKKKYSGVDKVFSNVSRMRWDVEQKKSIDFVDGTDGSITNKLKSLLKGKGIELDNINQQIVNQQKELGVEFFQSIIFYFNLIMQIRNYDKEKSGSEADYIQCPSCLFDSRKPEMNGKLSAITNGDANGAYNIARKGFMQLCRIRENPQEPMKLITNREWDEAVREWDIYSAAQKIPVLSEEN

SEQ ID NO: 70 - protein, 1373 aa, Moraxella bovoculi
MLFQDFTHLYPLSKTVRFELKPIDRTLEHIHAKNFLSQDETMADMHQKVKVILDDYHRDFIADMMGEVKLTKLAEFYDVYLKFRKNPKDDELQKQLKDLQAVLRKEIVKPIGNGGKYKAGYDRLFGAKLFKDGKELGDLAKFVIAQEGESSPKLAHLAHFEKFSTYFTGFHDNRKNMYSDEDKHTAIAYRLIHENLPRFIDNLQILTTIKQKHSALYDQIINELTASGLDVSLASHLDGYHKLLTQEGITAYNTLLGGISGEAGSPKIQGINELINSHHNQHCHKSERIAKLRPLHKQILSDGMSVSFLPSKFADDSEMCQAVNEFYRHYADVFAKVQSLFDGFDDHQKDGIYVEHKNLNELSKQAFGDFALLGRVLDGYYVDVVNPEFNERFAKAKTDNAKAKLTKEKDKFIKGVHSLASLEQAIEHYTARHDDESVQAGKLGQYFKHGLAGVDNPIQKIHNNHSTIKGFLERERPAGERALPKIKSGKNPEMTQLRQLKELLDNALNVAHFAKLLTTKTTLDNQDGNFYGEFGVLYDELAKIPTLYNKVRDYLSQKPFSTEKYKLNFGNPTLLNGWDLNKEKDNFGVILQKDGCYYLALLDKAHKKVFDNAPNTGKSIYQKMIYKYLEVRKQFPKVFFSKEAIAINYHPSKELVEIKDKGRQRSDDERLKLYRFILECLKIHPKYDKKFEGAIGDIQLFKKDKKGREVPISEKDLFDKINGIFSSKPKLEMEDFFIGEFKRYNPSQDLVDQYNIYKKIDSNDNRKKENFYNNHPKFKKDLVRYYYESMCKHEEWEESFEFSKKLQDIGCYVDVNELFTEIETRRLNYKISFCNINADYIDELVEQGQLYLFQIYNKDFSPKAHGKPNLHTLYFKALFSEDNLADPIYKLNGEAQIFYRKASLDMNETTIHRAGEVLENKNPDNPKKRQFVYDIIKDKRYTQDKFMLHVPITMNFGVQGMTIKEFNKKVNQSIQQYDEVNVIGIDRGERHLLYLTVINSKGEILEQCSLNDITTASANGTQMTTPYHKILDKREIERLNARVGWGEIETIKELKSGYLSHVVHQISQLMLKYNAIVVLEDLNFGFKRGRFKVEKQIYQNFENALIKKLNHLVLKDKADDEIGSYKNALQLTNNFTDLKSIGKQTGFLFYVPAWNTSKIDPETGFVDLLKPRYENIAQSQAFFGKFDKICYNADKDYFEFHIDYAKFTDKAKNSRQIWTICSHGDKRYVYDKTANQNKGAAKGINVNDELKSLFARHHINEKQPNLVMDICQNNDKEFHKSLMYLLKTLLALRYSNASSDEDFILSPVANDEGVFFNSALADDTQPQNADANGAYHIALKGLWLLNELKNSDDLNKVKLAIDNQTWLNFAQNR

SEQ ID NO: 71 - protein, 1352 aa, Artificial Sequence
  Description of Artificial Sequence: Synthetic polypeptide
MENIFDQFIGKYSLSKTLRFELKPVGKTEDFLKINKVFEKDQTIDDSYNQAKFYFDSLHQKFIDAALASDKTSELSFQNFADVLEKQNKIILDKKREMGALRKRDKNAVGIDRLQKEINDAEDIIQKEKEKIYKDVRTLFDNEAESWKTYYQEREVDGKKITFSKADLKQKGADFLTAAGILKVLKYEFPEEKEKEFQAKNQPSLFVEEKENPGQKRYIFDSFDKFAGYLTKFQQTKKNLYAADGTSTAVATRIADNFIIFHQNTKVFRDKYKNNHTDLGFDEENIFEIERYKNCLLQREIEHIKNENSYNKIIGRINKKIKEYRDQKAKDTKLTKSDFPFFKNLDKQILGEVEKEKQLIEKTREKTEEDVLIERFKEFIENNEERFTAAKKLMNAFCNGEFESEYEGIYLKNKAINTISRRWFVSDRDFELKLPQQKSKNKSEKNEPKVKKFISIAEIKNAVEELDGDIFKAVFYDKKIIAQGGSKLEQFLVIWKYEFEYLFRDIERENGEKLLGYDSCLKIAKQLGIFPQEKEAREKATAVIKNYADAGLGIFQMMKYFSLDDKDRKNTPGQLSTNFYAEYDGYYKDFEFIKYYNEFRNFITKKPFDEDKIKLNFENGALLKGWDENKEYDFMGVILKKEGRLYLGIMHKNHRKLFQSMGNAKGDNANRYQKMIYKQIADASKDVPRLLLTSKKAMEKFKPSQEILRIKKEKTFKRESKNFSLRDLHALIEYYRNCIPQYSNWSFYDFQFQDTGKYQNIKEFTDDVQKYGYKISFRDIDDEYINQALNEGKMYLFEVVNKDIYNTKNGSKNLHTLYFEHILSAENLNDPVFKLSGMAEIFQRQPSVNEREKITTQKNQCILDKGDRAYKYRRYTEKKIMFHMSLVLNTGKGEIKQVQFNKIINQRISSSDNEMRVNVIGIDRGEKNLLYYSVVKQNGEIIEQASLNEINGVNYRDKLIEREKERLKNRQSWKPVVKIKDLKKGYISHVIHKICQLIEKYSAIVVLEDLNMRFKQIRGGIERSVYQQFEKALIDKLGYLVFKDNRDLRAPGGVLNGYQLSAPFVSFEKMRKQTGILFYTQAEYTSKTDPITGFRKNVYISNSASLDKIKEAVKKFDAIGWDGKEQSYFFKYNPYNLADEKYKNSTVSKEWAIFASAPRIRRQKGEDGYWKYDRVKVNEEFEKLLKVWNFVNPKATDIKQEIIKKEKAGDLQGEKELDGRLRNFWHSFIYLFNLVLELRNSFSLQIKIKAGEVIAVDEGVDFIASPVKPFFTTPNPYIPSNLCWLAVENADANGAYNIARKGVMILKKIREHAKKDPEFKKLPNLFISNAEWDEAARDWGKYAGTTALNLDH

SEQ ID NO: 72 - protein, 1334 aa, Succinivibrio dextrinosolvens
MSSLTKFTNKYSKQLTIKNELIPVGKTLENIKENGLIDGDEQLNENYQKAKIIVDDFLRDFINKALNNTQIGNWRELADALNKEDEDNIEKLQDKIRGIIVSKFETFDLFSSYSIKKDEKIIDDDNDVEEEELDLGKKTSSFKYIFKKNLFKLVLPSYLKTTNQDKLKIISSFDNFSTYFRGFFENRKNIFTKKPISTSIAYRIVHDNFPKFLDNIRCFNVWQTECPQLIVKADNYLKSKNVIAKDKSLANYFTVGAYDYFLSQNGIDFYNNIIGGLPAFAGHEKIQGLNEFINQECQKDSELKSKLKNRHAFKMAVLFKQILSDREKSFVIDEFESDAQVIDAVKNFYAEQCKDNNVIFNLLNLIKNIAFLSDDELDGIFIEGKYLSSVSQKLYSDWSKLRNDIEDSANSKQGNKELAKKIKTNKGDVEKAISKYEFSLSELNSIVHDNTKFSDLLSCTLHKVASEKLVKVNEGDWPKHLKNNEEKQKIKEPLDALLEIYNTLLIFNCKSFNKNGNFYVDYDRCINELSSVVYLYNKTRNYCTKKPYNTDKFKLNFNSPQLGEGFSKSKENDCLTLLFKKDDNYYVGIIRKGAKINFDDTQAIADNTDNCIFKMNYFLLKDAKKFIPKCSIQLKEVKAHFKKSEDDYILSDKEKFASPLVIKKSTFLLATAHVKGKKGNIKKFQKEYSKENPTEYRNSLNEWIAFCKEFLKTYKAATIFDITTLKKAEEYADIVEFYKDVDNLCYKLEFCPIKTSFIENLIDNGDLYLFRINNKDFSSKSTGTKNLHTLYLQAIFDERNLNNPTIMLNGGAELFYRKESIEQKNRITHKAGSILVNKVCKDGTSLDDKIRNEIYQYENKFIDTLSDEAKKVLPNVIKKEATHDITKDKRFTSDKFFFHCPLTINYKEGDTKQFNNEVLSFLRGNPDINIIGIDRGERNLIYVTVINQKGEILDSVSFNTVTNKSSKIEQTVDYEEKLAVREKERIEAKRSWDSISKIATLKEGYLSAIVHEICLLMIKHNAIVVLENLNAGFKRIRGGLSEKSVYQKFEKMLINKLNYFVSKKESDWNKPSGLLNGLQLSDQFESFEKLGIQSGFIFYVPAAYTSKIDPTTGFANVLNLSKVRNVDAIKSFFSNFNEISYSKKEALFKFSFDLDSLSKKGFSSFVKFSKSKWNVYTFGERIIKPKNKQGYREDKRINLTFEMKKLLNEYKVSFDLENNLIPNLTSANLKDTFWKELFFIFKTTLQLRNSVTNGKEDVLISPVKNAKGEFFVSGTHNKTLPQDCDANGAYHIALKGLMILERNNLVREEKDTKKIMAISNVDWFEYVQKRRGVL

SEQ ID NO: 73 - protein, 1331 aa, Artificial Sequence
  Description of Artificial Sequence: Synthetic polypeptide
MKPVGKTEDFLKINKVFEKDQTIDDSYNQAKFYFDSLHQKFIDAALASDKTSELSFQNFADVLEKQNKIILDKKREMGALRKRDKNAVGIDRLQKEINDAEDIIQKEKEKIYKDVRTLFDNEAESWKTYYQEREVDGKKITFSKADLKQKGADFLTAAGILKVLKYEFPEEKEKEFQAKNQPSLFVEEKENPGQKRYIFDSFDKFAGYLTKFQQTKKNLYAADGTSTAVATRIADNFIIFHQNTKVFRDKYKNNHTDLGFDEENIFEIERYKNCLLQREIEHIKNENSYNKIIGRINKKIKEYRDQKAKDTKLTKSDFPFFKNLDKQILGEVEKEKQLIEKTREKTEEDVLIERFKEFIENNEERFTAAKKLMNAFCNGEFESEYEGIYLKNKAINTISRRWFVSDRDFELKLPQQKSKNKSEKNEPKVKKFISIAEIKNAVEELDGDIFKAVFYDKKIIAQGGSKLEQFLVIWKYEFEYLFRDIERENGEKLLGYDSCLKIAKQLGIFPQEKEAREKATAVIKNYADAGLGIFQMMKYFSLDDKDRKNTPGQLSTNFYAEYDGYYKDFEFIKYYNEFRNFITKKPFDEDKIKLNFENGALLKGWDENKEYDFMGVILKKEGRLYLGIMHKNHRKLFQSMGNAKGDNANRYQKMIYKQIADASKDVPRLLLTSKKAMEKFKPSQEILRIKKEKTFKRESKNFSLRDLHALIEYYRNCIPQYSNWSFYDFQFQDTGKYQNIKEFTDDVQKYGYKISFRDIDDEYINQALNEGKMYLFEVVNKDIYNTKNGSKNLHTLYFEHILSAENLNDPVFKLSGMAEIFQRQPSVNEREKITTQKNQCILDKGDRAYKYRRYTEKKIMFHMSLVLNTGKGEIKQVQFNKIINQRISSSDNEMRVNVIGIDRGEKNLLYYSVVKQNGEIIEQASLNEINGVNYRDKLIEREKERLKNRQSWKPVVKIKDLKKGYISHVIHKICQLIEKYSAIVVLEDLNMRFKQIRGGIERSVYQQFEKALIDKLGYLVFKDNRDLRAPGGVLNGYQLSAPFVSFEKMRKQTGILFYTQAEYTSKTDPITGFRKNVYISNSASLDKIKEAVKKFDAIGWDGKEQSYFFKYNPYNLADEKYKNSTVSKEWAIFASAPRIRRQKGEDGYWKYDRVKVNEEFEKLLKVWNFVNPKATDIKQEIIKKEKAGDLQGEKELDGRLRNFWHSFIYLFNLVLELRNSFSLQIKIKAGEVIAVDEGVDFIASPVKPFFTTPNPYIPSNLCWLAVENADANGAYNIARKGVMILKKIREHAKKDPEFKKLPNLFISNAEWDEAARDWGKYAGTTALNLDH

SEQ ID NO: 74 - protein, 1323 aa, Prevotella disiens
MENYQEFTNLFQLNKTLRFELKPIGKTCELLEEGKIFASGSFLEKDKVRADNVSYVKKEIDKKHKIFIEETLSSFSISNDLLKQYFDCYNELKAFKKDCKSDEEEVKKTALRNKCTSIQRAMREAISQAFLKSPQKKLLAIKNLIENVFKADENVQHFSEFTSYFSGFETNRENFYSDEEKSTSIAYRLVHDNLPIFIKNIYIFEKLKEQFDAKTLSEIFENYKLYVAGSSLDEVFSLEYFNNTLTQKGIDNYNAVIGKIVKEDKQEIQGLNEHINLYNQKHKDRRLPFFISLKKQILSDREALSWLPDMFKNDSEVIKALKGFYIEDGFENNVLTPLATLLSSLDKYNLNGIFIRNNEALSSLSQNVYRNFSIDEAIDANAELQTFNNYELIANALRAKIKKETKQGRKSFEKYEEYIDKKVKAIDSLSIQEINELVENYVSEFNSNSGNMPRKVEDYFSLMRKGDFGSNDLIENIKTKLSAAEKLLGTKYQETAKDIFKKDENSKLIKELLDATKQFQHFIKPLLGTGEEADRDLVFYGDFLPLYEKFEELTLLYNKVRNRLTQKPYSKDKIRLCFNKPKLMTGWVDSKTEKSDNGTQYGGYLFRKKNEIGEYDYFLGISSKAQLFRKNEAVIGDYERLDYYQPKANTIYGSAYEGENSYKEDKKRLNKVIIAYIEQIKQTNIKKSIIESISKYPNISDDDKVTPSSLLEKIKKVSIDSYNGILSFKSFQSVNKEVIDNLLKTISPLKNKAEFLDLINKDYQIFTEVQAVIDEICKQKTFIYFPISNVELEKEMGDKDKPLCLFQISNKDLSFAKTFSANLRKKRGAENLHTMLFKALMEGNQDNLDLGSGAIFYRAKSLDGNKPTHPANEAIKCRNVANKDKVSLFTYDIYKNRRYMENKFLFHLSIVQNYKAANDSAQLNSSATEYIRKADDLHIIGIDRGERNLLYYSVIDMKGNIVEQDSLNIIRNNDLETDYHDLLDKREKERKANRQNWEAVEGIKDLKKGYLSQAVHQIAQLMLKYNAIIALEDLGQMFVTRGQKIEKAVYQQFEKSLVDKLSYLVDKKRPYNELGGILKAYQLASSITKNNSDKQNGFLFYVPAWNTSKIDPVTGFTDLLRPKAMTIKEAQDFFGAFDNISYNDKGYFEFETNYDKFKIRMKSAQTRWTICTFGNRIKRKKDKNYWNYEEVELTEEFKKLFKDSNIDYENCNLKEEIQNKDNRKFFDDLIKLLQLTLQMRNSDDKGNDYIISPVANAEGQFFDSRNGDKKLPLDADANGAYNIARKGLWNIRQIKQTKNDKKLNLSISSTEWLDFVREKPYLK

SEQ ID NO: 75 - protein, 1318 aa, Flavobacterium branchiophilum
MTNKFTNQYSLSKTLRFELIPQGKTLEFIQEKGLLSQDKQRAESYQEMKKTIDKFHKYFIDLALSNAKLTHLETYLELYNKSAETKKEQKFKDDLKKVQDNLRKEIVKSFSDGDAKSIFAILDKKELITVELEKWFENNEQKDIYFDEKFKTFTTYFTGFHQNRKNMYSVEPNSTAIAYRLIHENLPKFLENAKAFEKIKQVESLQVNFRELMGEFGDEGLIFVNELEEMFQINYYNDVLSQNGITIYNSIISGFTKNDIKYKGLNEYINNYNQTKDKKDRLPKLKQLYKQILSDRISLSFLPDAFTDGKQVLKAIFDFYKINLLSYTIEGQEESQNLLLLIRQTIENLSSFDTQKIYLKNDTHLTTISQQVFGDFSVFSTALNYWYETKVNPKFETEYSKANEKKREILDKAKAVFTKQDYFSIAFLQEVLSEYILTLDHTSDIVKKHSSNCIADYFKNHFVAKKENETDKTFDFIANITAKYQCIQGILENADQYEDELKQDQKLIDNLKFFLDAILELLHFIKPLHLKSESITEKDTAFYDVFENYYEALSLLTPLYNMVRNYVTQKPYSTEKIKLNFENAQLLNGWDANKEGDYLTTILKKDGNYFLAIMDKKHNKAFQKFPEGKENYEKMVYKLLPGVNKMLPKVFFSNKNIAYFNPSKELLENYKKETHKKGDTFNLEHCHTLIDFFKDSLNKHEDWKYFDFQFSETKSYQDLSGFYREVEHQGYKINFKNIDSEYIDGLVNEGKLFLFQIYSKDFSPFSKGKPNMHTLYWKALFEEQNLQNVIYKLNGQAEIFFRKASIKPKNIILHKKKIKIAKKHFIDKKTKTSEIVPVQTIKNLNMYYQGKISEKELTQDDLRYIDNFSIFNEKNKTIDIIKDKRFTVDKFQFHVPITMNFKATGGSYINQTVLEYLQNNPEVKIIGLDRGERHLVYLTLIDQQGNILKQESLNTITDSKISTPYHKLLDNKENERDLARKNWGTVENIKELKEGYISQVVHKIATLMLEENAIVVMEDLNFGFKRGRFKVEKQIYQKLEKMLIDKLNYLVLKDKQPQELGGLYNALQLTNKFESFQKMGKQSGFLFYVPAWNTSKIDPTTGFVNYFYTKYENVDKAKAFFEKFEAIRFNAEKKYFEFEVKKYSDFNPKAEGTQQAWTICTYGERIETKRQKDQNNKFVSTPINLTEKIEDFLGKNQIVYGDGNCIKSQIASKDDKAFFETLLYWFKMTLQMRNSETRTDIDYLISPVMNDNGTFYNSRDYEKLENPTLPKDADANGAYHIAKKGLMLLNKIDQADLTKKVDLSISNRDWLQFVQKNK

SEQ ID NO: 76 - protein, 1310 aa, Helcococcus kunzii
MFEKLSNIVSISKTIRFKLIPVGKTLENIEKLGKLEKDFERSDFYPILKNISDDYYRQYIKEKLSDLNLDWQKLYDAHELLDSSKKESQKNLEMIQAQYRKVLFNILSGELDKSGEKNSKDLIKNNKALYGKLFKKQFILEVLPDFVNNNDSYSEEDLEGLNLYSKFTTRLKNFWETRKNVFTDKDIVTAIPFRAVNENFGFYYDNIKIFNKNIEYLENKIPNLENELKEADILDDNRSVKDYFTPNGFNYVITQDGIDVYQAIRGGFTKENGEKVQGINEILNLTQQQLRRKPETKNVKLGVLTKLRKQILEYSESTSFLIDQIEDDNDLVDRINKFNVSFFESTEVSPSLFEQIERLYNALKSIKKEEVYIDARNTQKFSQMLFGQWDVIRRGYTVKITEGSKEEKKKYKEYLELDETSKAKRYLNIREIEELVNLVEGFEEVDVFSVLLEKFKMNNIERSEFEAPIYGSPIKLEAIKEYLEKHLEEYHKWKLLLIGNDDLDTDETFYPLLNEVISDYYIIPLYNLTRNYLTRKHSDKDKIKVNFDFPTLADGWSESKISDNRSIILRKGGYYYLGILIDNKLLINKKNKSKKIYEILIYNQIPEFSKSIPNYPFTKKVKEHFKNNVSDFQLIDGYVSPLIITKEIYDIKKEKKYKKDFYKDNNTNKNYLYTIYKWIEFCKQFLYKYKGPNKESYKEMYDFSTLKDTSLYVNLNDFYADVNSCAYRVLFNKIDENTIDNAVEDGKLLLFQIYNKDFSPESKGKKNLHTLYWLSMFSEENLRTRKLKLNGQAEIFYRKKLEKKPIIHKEGSILLNKIDKEGNTIPENIYHECYRYLNKKIGREDLSDEAIALFNKDVLKYKEARFDIIKDRRYSESQFFFHVPITFNWDIKTNKNVNQIVQGMIKDGEIKHIIGIDRGERHLLYYSVIDLEGNIVEQGSLNTLEQNRFDNSTVKVDYQNKLRTREEDRDRARKNWTNINKIKELKDGYLSHVVHKLSRLIIKYEAIVIMENLNQGFKRGRFKVERQVYQKFELALMNKLSALSFKEKYDERKNLEPSGILNPIQACYPVDAYQELQGQNGIVFYLPAAYTSVIDPVTGFTNLFRLKSINSSKYEEFIKKFKNIYFDNEEEDFKFIFNYKDFAKANLVILNNIKSKDWKISTRGERISYNSKKKEYFYVQPTEFLINKLKELNIDYENIDIIPLIDNLEEKAKRKILKALFDTFKYSVQLRNYDFENDYIISPTADDNGNYYNSNEIDIDKTNLPNNGDANGAFNIARKGLLLKDRIVNSNESKVDLKIKNEDWINFIIS

SEQ ID NO: 77 - protein, 1307 aa, Acidaminococcus sp.
MTQFEGFTNLYQVSKTLRFELIPQGKTLKHIQEQGFIEEDKARNDHYKELKPIIDRIYKTYADQCLQLVQLDWENLSAAIDSYRKEKTEETRNALIEEQATYRNAIHDYFIGRTDNLTDAINKRHAEIYKGLFKAELFNGKVLKQLGTVTTTEHENALLRSFDKFTTYFSGFYENRKNVFSAEDISTAIPHRIVQDNFPKFKENCHIFTRLITAVPSLREHFENVKKAIGIFVSTSIEEVFSFPFYNQLLTQTQIDLYNQLLGGISREAGTEKIKGLNEVLNLAIQKNDETAHIIASLPHRFIPLFKQILSDRNTLSFILEEFKSDEEVIQSFCKYKTLLRNENVLETAEALFNELNSIDLTHIFISHKKLETISSALCDHWDTLRNALYERRISELTGKITKSAKEKVQRSLKHEDINLQEIISAAGKELSEAFKQKTSEILSHAHAALDQPLPTTLKKQEEKEILKSQLDSLLGLYHLLDWFAVDESNEVDPEFSARLTGIKLEMEPSLSFYNKARNYATKKPYSVEKFKLNFQMPTLASGWDVNKEKNNGAILFVKNGLYYLGIMPKQKGRYKALSFEPTEKTSEGFDKMYYDYFPDAAKMIPKCSTQLKAVTAHFQTHTTPILLSNNFIEPLEITKEIYDLNNPEKEPKKFQTAYAKKTGDQKGYREALCKWIDFTRDFLSKYTKTTSIDLSSLRPSSQYKDLGEYYAELNPLLYHISFQRIAEKEIMDAVETGKLYLFQIYNKDFAKGHHGKPNLHTLYWTGLFSPENLAKTSIKLNGQAELFYRPKSRMKRMAHRLGEKMLNKKLKDQKTPIPDTLYQELYDYVNHRLSHDLSDEARALLPNVITKEVSHEIIKDRRFTSDKFFFHVPITLNYQAANSPSKFNQRVNAYLKEHPETPIIGIDRGERNLIYITVIDSTGKILEQRSLNTIQQFDYQKKLDNREKERVAARQAWSVVGTIKDLKQGYLSQVIHEIVDLMIHYQAVVVLENLNFGFKSKRTGIAEKAVYQQFEKMLIDKLNCLVLKDYPAEKVGGVLNPYQLTDQFTSFAKMGTQSGFLFYVPAPYTSKIDPLTGFVDPFVWKTIKNHESRKHFLEGFDFLHYDVKTGDFILHFKMNRNLSFQRGLPGFMPAWDIVFEKNETQFDAKGTPFIAGKRIVPVIENHRFTGRYRDLYPANELIALLEEKGIVFRDGSNILPKLLENDDSHAIDTMVALIRSVLQMRNSNAATGEDYINSPVRDLNGVCFDSRFQNPEWPMDADANGAYHIALKGQLLLNHLKESKDLKLQNGISNQDWLAYIQELRN

SEQ ID NO: 78 - protein, 1307 aa, Francisella tularensis
MSIYQEFVNKYSLSKTLRFELIPQGKTLENIKARGLILDDEKRAKDYKKAKQIIDKYHQFFIEEILSSVCISEDLLQNYSDVYFKLKKSDDDNLQKDFKSAKDTIKKQISKYINDSEKFKNLFNQNLIDAKKGQESDLILWLKQSKDNGIELFKANSDITDIDEALEIIKSFKGWTTYFKGFHENRKNVYSSNDIPTSIIYRIVDDNLPKFLENKAKYESLKDKAPEAINYEQIKKDLAEELTFDIDYKTSEVNQRVFSLDEVFEIANFNNYLNQSGITKFNTIIGGKFVNGENTKRKGINEYINLYSQQINDKTLKKYKMSVLFKQILSDTESKSFVIDKLEDDSDVVTTMQSFYEQIAAFKTVEEKSIKETLSLLFDDLKAQKLDLSKIYFKNDKSLTDLSQQVFDDYSVIGTAVLEYITQQVAPKNLDNPSKKEQDLIAKKTEKAKYLSLETIKLALEEFNKHRDIDKQCRFEEILSNFAAIPMIFDEIAQNKDNLAQISIKYQNQGKKDLLQASAEEDVKAIKDLLDQTNNLLHRLKIFHISQSEDKANILDKDEHFYLVFEECYFELANIVPLYNKIRNYITQKPYSDEKFKLNFENSTLASGWDKNKESANTAILFIKDDKYYLGIMDKKHNKIFSDKAIEENKGEGYKKIVYKQIADASKDIQNLMIIDGKTVCKKGRKDRNGVNRQLLSLKRKHLPENIYRIKETKSYLKNEARFSRKDLYDFIDYYKDRLDYYDFEFELKPSNEYSDFNDFTNHIGSQGYKLTFENISQDYINSLVNEGKLYLFQIYSKDFSAYSKGRPNLHTLYWKALFDERNLQDVVYKLNGEAELFYRKQSIPKKITHPAKETIANKNKDNPKKESVFEYDLIKDKRFTEDKFFFHCPITINFKSSGANKFNDEINLLLKEKANDVHILSIDRGERHLAYYTLVDGKGNIIKQDNFNIIGNDRMKTNYHDKLAAIEKDRDSARKDWKKINNIKEMKEGYLSQVVHEIAKLVIEYNAIVVFEDLNFGFKRGRFKVEKQVYQKLEKMLIEKLNYLVFKDNEFDKTGGVLRAYQLTAPFETFKKMGKQTGIIYYVPAGFTSKICPVTGFVNQLYPKYESVSKSQEFFSKFDKICYNLDKGYFEFSFDYKNFGDKAAKGKWTIASFGSRLINFRNSDKNHNWDTREVYPTKELEKLLKDYSIEYGHGECIKAAICGESDKKFFAKLTSVLNTILQMRNSKTGTELDYLISPVADVNGNFFDSRQAPKNMPQDADANGAYHIGLKGLMLLDRIKNNQEGKKLNLVIKNEEYFEFVQNRNN

SEQ ID NO: 79 - protein, 1305 aa, Eubacterium sp.
MNKAADNYTGGNYDEFIALSKVQKTLRNELKPTPFTAEHIKQRGIISEDEYRAQQSLELKKIADEYYRNYITHKLNDINNLDFYNLFDAIEEKYKKNDKDNRDKLDLVEKSKRGEIAKMLSADDNFKSMFEAKLITKLLPDYVERNYTGEDKEKALETLALFKGFTTYFKGYFKTRKNMFSGEGGASSICHRIVNVNASIFYDNLKTFMRIQEKAGDEIALIEEELTEKLDGWRLEHIFSRDYYNEVLAQKGIDYYNQICGDINKHMNLYCQQNKFKANIFKMMKIQKQIMGISEKAFEIPPMYQNDEEVYASFNEFISRLEEVKLTDRLINILQNINIYNTAKIYINARYYTNVSSYVYGGWGVIDSAIERYLYNTIAGKGQSKVKKIENAKKDNKFMSVKELDSIVAEYEPDYFNAPYIDDDDNAVKAFGGQGVLGYFNKMSELLADVSLYTIDYNSDDSLIENKESALRIKKQLDDIMSLYHWLQTFIIDEVVEKDNAFYAELEDICCELENVVTLYDRIRNYVTKKPYSTQKFKLNFASPTLAAGWSRSKEFDNNAIILLRNNKYYIAIFNVNNKPDKQIIKGSEEQRLSTDYKKMVYNLLPGPNKMLPKVFIKSDTGKRDYNPSSYILEGYEKNRHIKSSGNFDINYCHDLIDYYKACINKHPEWKNYGFKFKETNQYNDIGQFYKDVEKQGYSISWAYISEEDINKLDEEGKIYLFEIYNKDLSAHSTGRDNLHTMYLKNIFSEDNLKNICIELNGEAELFYRKSSMKSNITHKKDTILVNKTYINETGVRVSLSDEDYMKVYNYYNNNYVIDTENDKNLIDIIEKIGHRKSKIDIVKDKRYTEDKYFLYLPITINYGIEDENVNSKIIEYIAKQDNMNVIGIDRGERNLIYISVIDNKGNIIEQKSFNLVNNYDYKNKLKNMEKTRDNARKNWQEIGKIKDVKSGYLSGVISKIARMVIDYNAIIVMEDLNKGFKRGRFKVERQVYQKFENMLISKLNYLVFKERKADENGGILRGYQLTYIPKSIKNVGKQCGCIFYVPAAYTSKIDPATGFINIFDFKKYSGSGINAKVKDKKEFLMSMNSIRYINECSEEYEKIGHRELFAFSFDYNNFKTYNVSSPVNEWTAYTYGERIKKLYKDGRWLRSEVLNLTENLIKLMEQYNIEYKDGHDIREDISHMDETRNADFICSLFEELKYTVQLRNSKSEAEDENYDRLVSPILNSSNGFYDSSDYMENENNTTHTMPKDADANGAYCIALKGLYEINKIKQNWSDDKKFKENELYINVTEWLDYIQNRRFE

SEQ ID NO: 80 - protein, 1300 aa, Francisella tularensis
MSIYQEFVNKYSLSKTLRFELIPQGKTLENIKARGLILDDEKRAKDYKKAKQIIDKYHQFFIEEILSSVCISEDLLQNYSDVYFKLKKSDDDNLQKDFKSAKDTIKKQISEYIKDSEKFKNLFNQNLIDAKKGQESDLILWLKQSKDNGIELFKANSDITDIDEALEIIKSFKGWTTYFKGFHENRKNVYSSNDIPTSIIYRIVDDNLPKFLENKAKYESLKDKAPEAINYEQIKKDLAEELTFDIDYKTSEVNQRVFSLDEVFEIANFNNYLNQSGITKFNTIIGGKFVNGENTKRKGINEYINLYSQQINDKTLKKYKMSVLFKQILSDTESKSFVIDKLEDDSDVVTTMQSFYEQIAAFKTVEEKSIKETLSLLFDDLKAQKLDLSKIYFKNDKSLTDLSQQVFDDYSVIGTAVLEYITQQVAPKNLDNPSKKEQDLIAKKTEKAKYLSLETIKLALEEFNKHRDIDKQCRFEEILANFAAIPMIFDEIAQNKDNLAQISIKYQNQGKKDLLQASAEDDVKAIKDLLDQTNNLLHRLKIFHISQSEDKANILDKDEHFYLVFEECYFELANIVPLYNKIRNYITQKPYSDEKFKLNFENSTLANGWDKNKEPDNTAILFIKDDKYYLGVMNKKNNKIFDDKAIKENKGEGYKKIVYKLLPGANKMLPKVFFSAKSIKFYNPSEDILRIRNHSTHTKNGNPQKGYEKFEFNIEDCRKFIDFYKESISKHPEWKDFGFRFSDTQRYNSIDEFYREVENQGYKLTFENISESYIDSVVNQGKLYLFQIYNKDFSAYSKGRPNLHTLYWKALFDERNLQDVVYKLNGEAELFYRKKSIPKKITHPAKEAIANKNKDNPKKESFFEYDLIKDKRFTEDKFFFHCPITINFKSSGANKFNDEINLLLKEKANDVHILSIDRGERHLAYYTLVDGKGNIIKQDTFNIIGNDRMKTNYHDKLAAIEKDRDSARKDWKKINNIKEMKEGYLSQVVHEIAKLVIEHNAIVVFEDLNFGFKRGRFKVEKQVYQKLEKMLIEKLNYLVFKDNEFDKTGGVLRAYQLTAPFETFKKMGKQTGIIYYVPAGFTSKICPVTGFVNQLYPKYESVSKSQEFFSKFDKICYNLDKGYFEFSFDYKNFGDKAAKGKWTIASFGSRLINFRNSDKNHNWDTREVYPTKELEKLLKDYSIEYGHGECIKAAICGESDKKFFAKLTSILNTILQMRNSKTGTELDYLISPVADVNGNFFDSRQAPKNMPQDADANGAYHIGLKGLMLLDRIKNNQEGKKLNLVIKNEEYFEFVQNRNN

SEQ ID NO: 81 - protein, 1300 aa, Francisella tularensis
MSIYQEFVNKYSLSKTLRFELIPQGKTLENIKARGLILDDEKRAKDYKKAKQIIDKYHQFFIEEILSSVCISEDLLQNYSDVYFKLKKSDDDNLQKDFKSAKDTIKKQISEYIKDSEKFKNLFNQNLIDAKKGQESDLILWLKQSKDNGIELFKANSDITDIDEALEIIKSFKGWTTYFKGFHENRKNVYSSDDIPTSIIYRIVDDNLPKFLENKAKYESLKDKAPEAINYEQIKKDLAEELTFDIDYKTSEVNQRVFSLDEVFEIANFNNYLNQSGITKFNTIIGGKFVNGENTKRKGINEYINLYSQQINDKTLKKYKMSVLFKQILSDTESKSFVIDKLEDDSDVVTTMQSFYEQIAAFKTVEEKSIKETLSLLFDDLKAQKLDLSKIYFKNDKSLTDLSQQVFDDYSVIGTAVLEYITQQVAPKNLDNPSKKEQDLIAKKTEKAKYLSLETIKLALEEFNKHRDIDKQCRFEEILANFAAIPMIFDEIAQNKDNLAQISLKYQNQGKKDLLQASAEEDVKAIKDLLDQTNNLLHRLKIFHISQSEDKANILDKDEHFYLVFEECYFELANIVPLYNKIRNYITQKPYSDEKFKLNFENSTLANGWDKNKEPDNTAILFIKDDKYYLGVMNKKNNKIFDDKAIKENKGEGYKKIVYKLLPGANKMLPKVFFSAKSIKFYNPSEDILRIRNHSTHTKNGNPQKGYEKFEFNIEDCRKFIDFYKESISKHPEWKDFGFRFSDTQRYNSIDEFYREVENQGYKLTFENISESYIDSVVNQGKLYLFQIYNKDFSAYSKGRPNLHTLYWKALFDERNLQDVVYKLNGEAELFYRKQSIPKKITHPAKEAIANKNKDNPKKESVFEYDLIKDKRFTEDKFFFHCPITINFKSSGANKFNDEINLLLKEKANDVHILSIDRGERHLAYYTLVDGKGNIIKQDTFNIIGNDRMKTNYHDKLAAIEKDRDSARKDWKKINNIKEMKEGYLSQVVHEIAKLVIEHNAIVVFEDLNFGFKRGRFKVEKQVYQKLEKMLIEKLNYLVFKDNEFDKTGGVLRAYQLTAPFETFKKMGKQTGIIYYVPAGFTSKICPVTGFVNQLYPKYESVSKSQEFFSKFDKICYNLDKGYFEFSFDYKNFGDKAAKGKWTIASFGSRLINFRNSDKNHNWDTREVYPTKELEKLLKDYSIEYGHGECIKAAICGESDKKFFAKLTSVLNTILQMRNSKTGTELDYLISPVADVNGNFFDSRQAPKNMPQDADANGAYHIGLKGLMLLDRIKNNQEGKKLNLVIKNEEYFEFVQNRNN

SEQ ID NO: 82 - protein, 1300 aa, Francisella tularensis; identical to SEQ ID NO: 48

SEQ ID NO: 83 - protein, 1285 aa, Artificial Sequence
  Description of Artificial Sequence: Synthetic polypeptide
MKSFDSFTNLYSLSKTLKFEMRPVGNTQKMLDNAGVFEKDKLIQKKYGKTKPYFDRLHREFIEEALTGVELIGLDENFRTLVDWQKDKKNNVAMKAYENSLQRLRTEIGKIFNLKAEDWVKNKYPILGLKNKNTDILFEEAVFGILKARYGEEKDTFIEVEEIDKTGKSKINQISIFDSWKGFTGYFKKFFETRKNFYKNDGTSTAIATRIIDQNLKRFIDNLSIVESVRQKVDLAETEKSFSISLSQFFSIDFYNKCLLQDGIDYYNKIIGGETLKNGEKLIGLNELINQYRQNNKDQKIPFFKLLDKQILSEKILFLDEIKNDTELIEALSQFAKTAEEKTKIVKKLFADFVENNSKYDLAQIYISQEAFNTISNKWTSETETFAKYLFEAMKSGKLAKYEKKDNSYKFPDFIALSQMKSALLSISLEGHFWKEKYYKISKFQEKTNWEQFLAIFLYEFNSLFSDKINTKDGETKQVGYYLFAKDLHNLILSEQIDIPKDSKVTIKDFADSVLTIYQMAKYFAVEKKRAWLAEYELDSFYTQPDTGYLQFYDNAYEDIVQVYNKLRNYLTKKPYSEEKWKLNFENSTLANGWDKNKESDNSAVILQKGGKYYLGLITKGHNKIFDDRFQEKFIVGIEGGKYEKIVYKFFPDQAKMFPKVCFSAKGLEFFRPSEEILRIYNNAEFKKGETYSIDSMQKLIDFYKDCLTKYEGWACYTFRHLKPTEEYQNNIGEFFRDVAEDGYRIDFQGISDQYIHEKNEKGELHLFEIHNKDWNLDKARDGKSKTTQKNLHTLYFESLFSNDNVVQNFPIKLNGQAEIFYRPKTEKDKLESKKDKKGNKVIDHKRYSENKIFFHVPLTLNRTKNDSYRFNAQINNFLANNKDINIIGVDRGEKHLVYYSVITQASDILESGSLNELNGVNYAEKLGKKAENREQARRDWQDVQGIKDLKKGYISQVVRKLADLAIKHNAIIILEDLNMRFKQVRGGIEKSIYQQLEKALIDKLSFLVDKGEKNPEQAGHLLKAYQLSAPFETFQKMGKQTGIIFYTQASYTSKSDPVTGWRPHLYLKYFSAKKAKDDIAKFTKIEFVNDRFELTYDIKDFQQAKEYPNKTVWKVCSNVERFRWDKNLNQNKGGYTHYTNITENIQELFTKYGIDITKDLLTQISTIDEKQNTSFFRDFIFYFNLICQIRNTDDSEIAKKNGKDDFILSPVEPFFDSRKDNGNKLPENGDDNGAYNIARKGIVILNKISQYSEKNENCEKMKWGDLYVSNIDWDNFVTQANARH

SEQ ID NO: 84 - protein, 1282 aa, Eubacterium eligens
MNGNRSIVYREFVGVTPVAKTLRNELRPVGHTQEHIIQNGLIQEDELRQEKSTELKNIMDDYYREYIDKSLSGLTDLDFTLLFELMNSVQSSLSKDNKKALEKEHNKMREQICTHLQSDSDYKNMFNAKLFKEILPDFIKNYNQYDVKDKAGKLETLALFNGFSTYFTDFFEKRKNVFTKEAVSTSIAYRIVHENSLIFLANMTSYKKISEKALDEIEVIEKNNQDKMGDWELNQIFNPDFYNMVLIQSGIDFYNEICGVVNAHMNLYCQQTKNNYNLFKMRKLHKQILAYTSTSFEVPKMFEDDMSVYNAVNAFIDETEKGNIIGKLKDIVNKYDELDEKRIYISKDFYETLSCFMSGNWNLITGCVENFYDENIHAKGKSKEEKVKKAVKEDKYKSINDVNDLVEKYIDEKERNEFKNSNAKQYIREISNIITDTETAHLEYDEHISLIESEEKADEIKKRLDMYMNMYHWVKAFIVDEVLDRDEMFYSDIDDIYNILENIVPLYNRVRNYVTQKPYTSKKIKLNFQSPTLANGWSQSKEFDNNAIILIRDNKYYLAIFNAKNKPDKKIIQGNSDKKNDNDYKKMVYNLLPGANKMLPKVFLSKKGIETFKPSDYIISGYNAHKHIKTSENFDISFCRDLIDYFKNSIEKHAEWRKYEFKFSATDSYNDISEFYREVEMQGYRIDWTYISEADINKLDEEGKIYLFQIYNKDFAENSTGKENLHTMYFKNIFSEENLKNIVIKLNGQAELFYRKASVKNPVKHKKDSVLVNKTYKNQLDNGDVVRIPIPDDIYNEIYKMYNGYIKESDLSEAAKEYLDKVEVRTAQKDIVKDYRYTVDKYFIHTPITINYKVTARNNVNDMAVKYIAQNDDIHVIGIDRGERNLIYISVIDSHGNIVKQKSYNILNNYDYKKKLVEKEKTREYARKNWKSIGNIKELKEGYISGVVHEIAMLMVEYNAIIAMEDLNYGFKRGRFKVERQVYQKFESMLINKLNYFASKGKSVDEPGGLLKGYQLTYVPDNIKNLGKQCGVIFYVPAAFTSKIDPSTGFISAFNFKSISTNASRKQFFMQFDEIRYCAEKDMFSFGFDYNNFDTYNITMGKTQWTVYTNGERLQSEFNNARRTGKTKSINLTETIKLLLEDNEINYADGHDVRIDMEKMYEDKNSEFFAQLLSLYKLTVQMRNSYTEAEEQEKGISYDKIISPVINDEGEFFDSDNYKESDDKECKMPKDADANGAYCIALKGLYEVLKIKSEWTEDGFDRNCLKLPHAEWLDFIQNKRYE

SEQ ID NO: 85 - protein, 1282 aa, Eubacterium eligens
MNGNRSIVYREFVGVIPVAKTLRNELRPVGHTQEHIIQNGLIQEDELRQEKSTELKNIMDDYYREYIDKSLSGVTDLDFTLLFELMNLVQSSPSKDNKKALEKEQSKMREQICTHLQSDSNYKNIFNAKLLKEILPDFIKNYNQYDVKDKAGKLETLALFNGFSTYFTDFFEKRKNVFTKEAVSTSIAYRIVHENSLIFLANMTSYKKISEKALDEIEVIEKNNQDKMGDWELNQIFNPDFYNMVLIQSGIDFYNEICGVVNAHMNLYCQQTKNNYNLFKMRKLHKQILAYTSTSFEVPKMFEDDMSVYNAVNAFIDETEKGNIIGKLKDIVNKYDELDEKRIYISKDFYETLSCFMSGNWNLITGCVENFYDENIHAKGKSKEEKVKKAVKEDKYKSINDVNDLVEKYIDEKERNEFKNSNAKQYIREISNIITDTETAHLEYDDHISLIESEEKADEMKKRLDMYMNMYHWAKAFIVDEVLDRDEMFYSDIDDIYNILENIVPLYNRVRNYVTQKPYNSKKIKLNFQSPTLANGWSQSKEFDNNAIILIRDNKYYLAIFNAKNKPDKKIIQGNSDKKNDNDYKKMVYNLLPGANKMLPKVFLSKKGIETFKPSDYIISGYNAHKHIKTSENFDISFCRDLIDYFKNSIEKHAEWRKYEFKFSATDSYSDISEFYREVEMQGYRIDWTYISEADINKLDEEGKIYLFQIYNKDFAENSTGKENLHTMYFKNIFSEENLKDIIIKLNGQAELFYRRASVKNPVKHKKDSVLVNKTYKNQLDNGDVVRIPIPDDIYNEIYKMYNGYIKESDLSEAAKEYLDKVEVRTAQKDIVKDYRYTVDKYFIHTPITINYKVTARNNVNDMVVKYIAQNDDIHVIGIDRGERNLIYISVIDSHGNIVKQKSYNILNNYDYKKKLVEKEKTREYARKNWKSIGNIKELKEGYISGVVHEIAMLIVEYNAIIAMEDLNYGFKRGRFKVERQVYQKFESMLINKLNYFASKEKSVDEPGGLLKGYQLTYVPDNIKNLGKQCGVIFYVPAAFTSKIDPSTGFISAFNFKSISTNASRKQFFMQFDEIRYCAEKDMFSFGFDYNNFDTYNITMGKTQWTVYTNGERLQSEFNNARRTGKTKSINLTETIKLLLEDNEINYADGHDIRIDMEKMDEDKKSEFFAQLLSLYKLTVQMRNSYTEAEEQENGISYDKIISPVINDEGEFFDSDNYKESDDKECKMPKDADANGAYCIALKGLYEVLKIKSEWTEDGFDRNCLKLPHAEWLDFIQNKRYE

SEQ ID NO: 86 - protein, 1273 aa, Flavobacterium sp.
MKNFSNLYQVSKTVRFELKPIGNTLENIKNKSLLKNDSIRAESYQKMKKTIDEFHKYFIDLALNNKKLSYLNEYIALYTQSAEAKKEDKFKADFKKVQDNLRKEIVSSFTEGEAKAIFSVLDKKELITIELEKWKNENNLAVYLDESFKSFTTYFTGFHQNRKNMYSAEANSTAIAYRLIHENLPKFIENSKAFEKSSQIAELQPKIEKLYKEFEAYLNVNSISELFEIDYFNEVLTQKGITVYNNIIGGRTATEGKQKIQGLNEIINLYNQTKPKNERLPKLKQLYKQILSDRISLSFLPDAFTEGKQVLKAVFEFYKINLLSYKQDGVEESQNLLELIQQVVKNLGNQDVNKIYLKNDTSLTTIAQQLFGDFSVFSAALQYRYETVVNPKYTAEYQKANEAKQEKLDKEKIKFVKQDYFSIAFLQEVVADYVKTLDENLDWKQKYTPSCIADYFTTHFIAKKENEADKTFNFIANIKAKYQCIQGILEQADDYEDELKQDQKLIDNIKFFLDAILEVVHFIKPLHLKSESITEKDNAFYDVFENYYEALNVVTPLYNMVRNYVTQKPYSTEKIKLNFENAQLLNGWDANKEKDYLTTILKRDGNYFLAIMDKKHNKTFQQFTEDDENYEKIVYKLLPGVNKMLPKVFFSNKNIAFFNPSKEILDNYKNNTHKKGATFNLKDCHALIDFFKDSLNKHEDWKYFDFQFSETKTYQDLSGFYKEVEHQGYKINFKKVSVSQIDTLIEEGKMYLFQIYNKDFSPYAKGKPNMHTLYWKALFETQNLENVIYKLNGQAEIFFRKASIKKKNIITHKAHQPIAAKNPLTPTAKNTFAYDLIKDKRYTVDKFQFHVPITMNFKATGNSYINQDVLAYLKDNPEVNIIGLDRGERHLVYLTLIDQKGTILLQESLNVIQDEKTHTPYHTLLDNKEIARDKARKNWGSIESIKELKEGYISQVVHKITKMMIEHNAIVVMEDLNFGFKRGRFKVEKQIYQKLEKMLIDKLNYLVLKDKQPHELGGLYNALQLTNKFESFQKMGKQSGFLFYVPAWNTSKIDPTTGFVNYFYTKYENVEKAKTFFSKFDSILYNKTKGYFEFVVKNYSDFNPKAADTRQEWTICTHGERIETKRQKEQNNNFVSTTIQLTEQFVNFFEKVGLDLSKELKTQLIAQNEKSFFEELFHLLKLTLQMRNSESHTEIDYLISPVANEKGIFYDSRKATASLPIDADANGAYHIAKKGLWIMEQINKTNSEDDLKKVKLAISNREWLQYVQQVQKK

SEQ ID NO: 87 - protein, 1264 aa, Prevotella brevis
MKQFTNLYQLSKTLRFELKPIGKTLEHINANGFIDNDAHRAESYKKVKKLIDDYHKDYIENVLNNFKLNGEYLQAYFDLYSQDTKDKQFKDIQDKLRKSIASALKGDDRYKTIDKKELIRQDMKTFLKKDTDKALLDEFYEFTTYFTGYHENRKNMYSDEAKSTAIAYRLIHDNLPKFIDNIAVFKKIANTSVADNFSTIYKNFEEYLNVNSIDEIFSLDYYNIVLTQTQIEVYNSIIGGRTLEDDTKIQGINEFVNLYNQQLANKKDRLPKLKPLFKQILSDRVQLSWLQEEFNTGADVLNAVKEYCTSYFDNVEESVKVLLTGISDYDLSKIYITNDLALTDVSQRMFGEWSIIPNAIEQRLRSDNPKKTNEKEEKYSDRISKLKKLPKSYSLGYINECISELNGIDIADYYATLGAINTESKQEPSIPTSIQVHYNALKPILDTDYPREKNLSQDKLTVMQLKDLLDDFKALQHFIKPLLGNGDEAEKDEKFYGELMQLWEVIDSITPLYNKVRNYCTRKPFSTEKIKVNFENAQLLDGWDENKESTNASIILRKNGMYYLGIMKKEYRNILTKPMPSDGDCYDKVVYKFFKDITTMVPKCTTQMKSVKEHFSNSNDDYTLFEKDKFIAPVVITKEIFDLNNVLYNGVKKFQIGYLNNTGDSFGYNHAVEIWKSFCLKFLKAYKSTSIYDFSSIEKNIGCYNDLNSFYGAVNLLLYNLTYRKVSVDYIHQLVDEDKMYLFMIYNKDFSTYSKGTPNMHTLYWKMLFDESNLNDVVYKLNGQAEVFYRKKSITYQHPTHPANKPIDNKNVNNPKKQSNFEYDLIKDKRYTVDKFMFHVPITLNFKGMGNGDINMQVREYIKTTDDLHFIGIDRGERHLLYICVINGKGEIVEQYSLNEIVNNYKGTEYKTDYHTLLSERDKKRKEERSSWQTIEGIKELKSGYLSQVIHKITQLMIKYNAIVLLEDLNMGFKRGRQKVESSVYQQFEKALIDKLNYLVDKNKDANEIGGLLHAYQLTNDPKLPNKNSKQSGFLFYVPAWNTSKIDPVTGFVNLLDTRYENVAKAQAFFKKFDSIRYNKEYDRFEFKFDYSNFTAKAEDTRTQWTLCTYGTRIETFRNAEKNSNWDSREIDLTTEWKTLFTQHNIPLNANLKEAILLQANKNFYTDILHLMKLTLQMRNSVTGTDIDYMVSPVANECGEFFDSRKVKEGLPVNADANGAYNIARKGLWLAQQIKNANDLSDVKLAITNKEWLQFAQKKQYLKD

SEQ ID NO: 88 - protein, 1264 aa, Moraxella caprae
MLFQDFTHLYPLSKTMRFELKPIGKTLEHIHAKNFLSQDETMADMYQKVKAILDDYHRDFIADMMGEVKLTKLAEFYDVYLKFRKNPKDDGLQKQLKDLQAVLRKEIVKPIGNGGKYKAGYDRLFGAKLFKDGKELGDLAKFVIAQEGESSPKLAHLAHFEKFSTYFTGFHDNRKNMYSDEDKHTAITYRLIHENLPRFIDNLQILATIKQKHSALYDQIINELTASGLDVSLASHLDGYHKLLTQEGITAYNTLLGGISGEAGSRKIQGINELINSHHNQHCHKSERIAKLRPLHKQILSDGMGVSFLPSKFADDSEMCQAVNEFYRHYADVFAKVQSLFDGFDDHQKDGIYVEHKNLNELSKQAFGDFALLGRVLDGYYVDVVNPEFNERFAKAKTDNAKAKLTKEKDKFIKGVHSLASLEQAIEHYTARHDDESVQAGKLGQYFKHGLAGVDNPIQKIHNNHSTIKGFLERERPAGERALPKIKSGKNPEMTQLRQLKELLDNALNVAHFAKLLTTKTTLDNQDGNFYGEFGALYDELAKIPTLYNKVRDYLSQKPFSTEKYKLNFGNPTLLNGWDLNKEKDNFGIILQKDGCYYLALLDKAHKKVFDNAPNTGKNVYQKMIYKLLPGPNKMLPKVFFAKSNLDYYNPSAELLDKYAQGTHKKGNNFNLKDCHALIDFFKAGINKHPEWQHFGFKFSPTSSYQDLSDFYREVEPQGYQVKFVDINADYINELVEQGQLYLFQIYNKDFSPKAHGKPNLHTLYFKALFSKDNLANPIYKLNGEAQIFYRKASLDMNETTIHRAGEVLENKNPDNPKKRQFVYDIIKDKRYTQDKFMLHVPITMNFGVQGMTIKEFNKKVNQSIQQYDEVNVIGIDRGERHLLYLTVINSKGEILEQRSLNDITTASANGTQMTTPYHKILDKREIERLNARVGWGEIETIKELKSGYLSHVVHQISQLMLKYNAIVVLEDLNFGFKRGRFKVEKQIYQNFENALIKKLNHLVLKDEADDEIGSYKNALQLTNNFTDLKSIGKQTGFLFYVPAWNTSKIDPETGFVDLLKPRYENIAQSQAFFGKFDKICYNADKDYFEFHIDYAKFTDKAKNSRQIWKICSHGDKRYVYDKTANQNKGATKGINVNDELKSLFARHHINDKQPNLVMDICQNNDKEFHKSLIYLLKTLLALRYSNASSDEDFILSPVANDEGMFFNSALADDTQPQNADANGAYHIALKGLWVLEQIKNSDDLNKVKLAIDNQTWLNFAQNR

SEQ ID NO: 89 - protein, 1263 aa, Leptospira inadai
MEDYSGFVNIYSIQKTLRFELKPVGKTLEHIEKKGFLKKDKIRAEDYKAVKKIIDKYHRAYIEEVFDSVLHQKKKKDKTRFSTQFIKEIKEFSELYYKTEKNIPDKERLEALSEKLRKMLVGAFKGEFSEEVAEKYKNLFSKELIRNEIEKFCETDEERKQVSNFKSFTTYFTGFHSNRQNIYSDEKKSTAIGYRIIHQNLPKFLDNLKIIESIQRRFKDFPWSDLKKNLKKIDKNIKLTEYFSIDGFVNVLNQKGIDAYNTILGGKSEESGEKIQGLNEYINLYRQKNNIDRKNLPNVKILFKQILGDRETKSFIPEAFPDDQSVLNSITEFAKYLKLDKKKKSIIAELKKFLSSFNRYELDGIYLANDNSLASISTFLFDDWSFIKKSVSFKYDESVGDPKKKIKSPLKYEKEKEKWLKQKYYTISFLNDAIESYSKSQDEKRVKIRLEAYFAEFKSKDDAKKQFDLLERIEEAYAIVEPLLGAEYPRDRNLKADKKEVGKIKDFLDSIKSLQFFLKPLLSAEIFDEKDLGFYNQLEGYYEEIDSIGHLYNKVRNYLTGKIYSKEKFKLNFENSTLLKGWDENREVANLCVIFREDQKYYLGVMDKENNTILSDIPKVKPNELFYEKMVYKLIPTPHMQLPRIIFSSDNLSIYNPSKSILKIREAKSFKEGKNFKLKDCHKFIDFYKESISKNEDWSRFDFKFSKTSSYENISEFYREVERQGYNLDFKKVSKFYIDSLVEDGKLYLFQIYNKDFSIFSKGKPNLHTIYFRSLFSKENLKDVCLKLNGEAEMFFRKKSINYDEKKKREGHHPELFEKLKYPILKDKRYSEDKFQFHLPISLNFKSKERLNFNLKVNEFLKRNKDINIIGIDRGERNLLYLVMINQKGEILKQTLLDSMQSGKGRPEINYKEKLQEKEIERDKARKSWGTVENIKELKEGYLSIVIHQISKLMVENNAIVVLEDLNIGFKRGRQKVERQVYQKFEKMLIDKLNFLVFKENKPTEPGGVLKAYQLTDEFQSFEKLSKQTGFLFYVPSWNTSKIDPRTGFIDFLHPAYENIEKAKQWINKFDSIRFNSKMDWFEFTADTRKFSENLMLGKNRVWVICTTNVERYFTSKTANSSIQYNSIQITEKLKELFVDIPFSNGQDLKPEILRKNDAVFFKSLLFYIKTTLSLRQNNGKKGEEEKDFILSPVVDSKGRFFNSLEASDDEPKDADANGAYHIALKGLMNLLVLNETKEENLSRPKWKIKNKDWLEFVWERNR

SEQ ID NO: 90 - protein, 1262 aa, Porphyromonas crevioricanis
MPWIDLKDFTNLYPVSKTLRFELKPVGKTLENIEKAGILKEDEHRAESYRRVKKIIDTYHKVFIDSSLENMAKMGIENEIKAMLQSFCELYKKDHRTEGEDKALDKIRAVLRGLIVGAFTGVCGRRENTVQNEKYESLFKEKLIKEILPDFVLSTEAESLPFSVEEATRSLKEFDSFTSYFAGFYENRKNIYSTKPQSTAIAYRLIHENLPKFIDNILVFQKIKEPIAKELEHIRADFSAGGYIKKDERLEDIFSLNYYIHVLSQAGIEKYNALIGKIVTEGDGEMKGLNEHINLYNQQRGREDRLPLFRPLYKQILSDREQLSYLPESFEKDEELLRALKEFYDHIAEDILGRTQQLMTSISEYDLSRIYVRNDSQLTDISKKMLGDWNAIYMARERAYDHEQAPKRITAKYERDRIKALKGEESISLANLNSCIAFLDNVRDCRVDTYLSTLGQKEGPHGLSNLVENVFASYHEAEQLLSFPYPEENNLIQDKDNVVLIKNLLDNISDLQRFLKPLWGMGDEPDKDERFYGEYNYIRGALDQVIPLYNKVRNYLTRKPYSTRKVKLNFGNSQLLSGWDRNKEKDNSCVILRKGQNFYLAIMNNRHKRSFENKVLPEYKEGEPYFEKMDYKFLPDPNKMLPKVFLSKKGIEIYEPSPKLLEQYGHGTHKKGDTFSMDDLHELIDFFKHSIEAHEDWKQFGFKFSDTATYENVSSFYREVEDQGYKLSFRKVSESYVYSLIDQGKLYLFQIYNKDFSPCSKGTPNLHTLYWRMLFDERNLADVIYKLDGKAEIFFREKSLKNDHPTHPAGKPIKKKSRQKKGEESLFEYDLVKDRRYTMDKFQFHVPITMNFKCSAGSKVNDMVNAHIREAKDMHVIGIDRGERNLLYICVIDSRGTILDQISLNTINDIDYHDLLESRDKDRQQERRNWQTIEGIKELKQGYLSQAVHRIAELMVAYKAVVALEDLNMGFKRGRQKVESSVYQQFEKQLIDKLNYLVDKKKRPEDIGGLLRAYQFTAPFKSFKEMGKQNGFLFYIPAWNTSNIDPTTGFVNLFHAQYENVDKAKSFFQKFDSISYNPKKDWFEFAFDYKNFTKKAEGSRSMWILCTHGSRIKNFRNSQKNGQWDSEEFALTEAFKSLFVRYEIDYTADLKTAIVDEKQKDFFVDLLKLFKLTVQMRNSWKEKDLDYLISPVAGADGRFFDTREGNKSLPKDADANGAYNIALKGLWALRQIRQTSEGGKLKLAISNKEWLQFVQERSYEKD

SEQ ID NO: 91 - protein, 1262 aa, Artificial Sequence
  Description of Artificial Sequence: Synthetic polypeptide
MRKFNEFVGLYPISKTLRFELKPIGKTLEHIQRNKLLEHDAVRADDYVKVKKIIDKYHKCLIDEALSGFTFDTEADGRSNNSLSEYYLYYNLKKRNEQEQKTFKTIQNNLRKQIVNKLTQSEKYKRIDKKELITTDLPDFLTNESEKELVEKFKNFTTYFTEFHKNRKNMYSKEEKSTAIAFRLINENLPKFVDNIAAFEKVVSSPLAEKINALYEDFKEYLNVEEISRVFRLDYYDELLTQKQIDLYNAIVGGRTEEDNKIQIKGLNQYINEYNQQQTDRSNRLPKLKPLYKQILSDRESVSWLPPKFDSDKNLLIKIKECYDALSEKEKVFDKLESILKSLSTYDLSKIYISNDSQLSYISQKMFGRWDIISKAIREDCAKRNPQKSRESLEKFAERIDKKLKTIDSISIGDVDECLAQLGETYVKRVEDYFVAMGESEIDDEQTDTTSFKKNIEGAYESVKELLNNADNITDNNLMQDKGNVEKIKTLLDAIKDLQRFIKPLLGKGDEADKDGVFYGEFTSLWTKLDQVTPLYNMVRNYLTSKPYSTKKIKLNFENSTLMDGWDLNKEPDNTTVIFCKDGLYYLGIMGKKYNRVFVDREDLPHDGECYDKMEYKLLPGANKMLPKVFFSETGIQRFLPSEELLGKYERGTHKKGAGFDLGDCRALIDFFKKSIERHDDWKKFDFKFSDTSTYQDISEFYREVEQQGYKMSFRKVSVDYIKSLVEEGKLYLFQIYNKDFSAHSKGTPNMHTLYWKMLFDEENLKDVVYKLNGEAEVFFRKSSITVQSPTHPANSPIKNKNKDNQKKESKFEYDLIKDRRYTVDKFLFHVPITMNFKSVGGSNINQLVKRHIRSATDLHIIGIDRGERHLLYLTVIDSRGNIKEQFSLNEIVNEYNGNTYRTDYHELLDTREGERTEARRNWQTIQNIRELKEGYLSQVIHKISELAIKYNAVIVLEDLNFGFMRSRQKVEKQVYQKFEKMLIDKLNYLVDKKKPVAETGGLLRAYQLTGEFESFKTLGKQSGILFYVPAWNTSKIDPVTGFVNLFDTHYENIEKAKVFFDKFKSIRYNSDKDWFEFVVDDYTRFSPKAEGTRRDWTICTQGKRIQICRNHQRNNEWEGQEIDLTKAFKEHFEAYGVDISKDLREQINTQNKKEFFEELLRLLRLTLQMRNSMPSSDIDYLISPVANDTGCFFDSRKQAELKENAVLPMNADANGAYNIARKGLLAIRKMKQEENDSAKISLAISNKEWLKFAQTKPYLED

SEQ ID NO: 92 - protein, 1260 aa, Porphyromonas crevioricanis
MDSLKDFTNLYPVSKTLRFELKPVGKTLENIEKAGILKEDEHRAESYRRVKKIIDTYHKVFIDSSLENMAKMGIENEIKAMLQSFCELYKKDHRTEGEDKALDKIRAVLRGLIVGAFTGVCGRRENTVQNEKYESLFKEKLIKEILPDFVLSTEAESLPFSVEEATRSLKEFDSFTSYFAGFYENRKNIYSTKPQSTAIAYRLIHENLPKFIDNILVFQKIKEPIAKELEHIRADFSAGGYIKKDERLEDIFSLNYYIHVLSQAGIEKYNALIGKIVTEGDGEMKGLNEHINLYNQQRGREDRLPLFRPLYKQILSDREQLSYLPESFEKDEELLRALKEFYDHIAEDILGRTQQLMTSISEYDLSRIYVRNDSQLTDISKKMLGDWNAIYMARERAYDHEQAPKRITAKYERDRIKALKGEESISLANLNSCIAFLDNVRDCRVDTYLSTLGQKEGPHGLSNLVENVFASYHEAEQLLSFPYPEENNLIQDKDNVVLIKNLLDNISDLQRFLKPLWGMGDEPDKDERFYGEYNYIRGALDQVIPLYNKVRNYLTRKPYSTRKVKLNFGNSQLLSGWDRNKEKDNSCVILRKGQNFYLAIMNNRHKRSFENKMLPEYKEGEPYFEKMDYKFLPDPNKMLPKVFLSKKGIEIYKPSPKLLEQYGHGTHKKGDTFSMDDLHELIDFFKHSIEAHEDWKQFGFKFSDTATYENVSSFYREVEDQGYKLSFRKVSESYVYSLIDQGKLYLFQIYNKDFSPCSKGTPNLHTLYWRMLFDERNLADVIYKLDGKAEIFFREKSLKNDHPTHPAGKPIKKKSRQKKGEESLFEYDLVKDRRYTMDKFQFHVPITMNFKCSAGSKVNDMVNAHIREAKDMHVIGIDRGERNLLYICVIDSRGTILDQISLNTINDIDYHDLLESRDKDRQQEHRNWQTIEGIKELKQGYLSQAVHRIAELMVAYKAVVALEDLNMGFKRGRQKVESSVYQQFEKQLIDKLNYLVDKKKRPEDIGGLLRAYQFTAPFKSFKEMGKQNGFLFYIPAWNTSNIDPTTGFVNLFHVQYENVDKAKSFFQKFDSISYNPKKDWFEFAFDYKNFTKKAEGSRSMWILCTHGSRIKNFRNSQKNGQWDSEEFALTEAFKSLFVRYEIDYTADLKTAIVDEKQKDFFVDLLKLFKLTVQMRNSWKEKDLDYLISPVAGADGRFFDTREGNKSLPKDADANGAYNIALKGLWALRQIRQTSEGGKLKLAISNKEWLQFVQERSYEKD

SEQ ID NO: 93 - protein, 1260 aa, Porphyromonas crevioricanis
MDSLKDFTNLYPVSKTLRFELKPVGKTLENIEKAGILKEDEHRAESYRRVKKIIDTYHKVFIDSSLENMAKMGIENEIKAMLQSFCELYKKDHRTEGEDKALDKIRAVLRGLIVGAFTGVCGRRENTVQNEKYESLFKEKLIKEILPDFVLSTEAESLPFSVEEATRSLKEFDSFTSYFAGFYENRKNIYSTKPQSTAIAYRLIHENLPKFIDNILVFQKIKEPIAKELEHIRADFSAGGYIKKDERLEDIFSLNYYIHVLSQAGIEKYNALIGKIVTEGDGEMKGLNEHINLYNQQRGREDRLPLFRPLYKQILSDREQLSYLPESFEKDEELLRALKEFYDHIAEDILGRTQQLMTSISEYDLSRIYVRNDSQLTDISKKMLGDWNAIYMARERAYDHEQAPKRITAKYERDRIKALKGEESISLANLNSCIAFLDNVRDCRVDTYLSTLGQKEGPHGLSNLVENVFASYHEAEQLLSFPYPEENNLIQDKDNVVLIKNLLDNISDLQRFLKPLWGMGDEPDKDERFYGEYNYIRGALDQVIPLYNKVRNYLTRKPYSTRKVKLNFGNSQLLSGWDRNKEKDNSCVILRKGQNFYLAIMNNRHKRSFENKVLPEYKEGEPYFEKMDYKFLPDPNKMLPKVFLSKKGIEIYKPSPKLLEQYGHGTHKKGDTFSMDDLHELIDFFKHSIEAHEDWKQFGFKFSDTATYENVSSFYREVEDQGYKLSFRKVSESYVYSLIDQGKLYLFQIYNKDFSPCSKGTPNLHTLYWRMLFDERNLADVIYKLDGKAEIFFREKSLKNDHPTHPAGKPIKKKSRQKKGEESLFEYDLVKDRHYTMDKFQFHVPITMNFKCSAGSKVNDMVNAHIREAKDMHVIGIDRGERNLLYICVIDSRGTILDQISLNTINDIDYHDLLESRDKDRQQERRNWQTIEGIKELKQGYLSQAVHRIAELMVAYKAVVALEDLNMGFKRGRQKVESSVYQQFEKQLIDKLNYLVDKKKRPEDIGGLLRAYQFTAPFKSFKEMGKQNGFLFYIPAWNTSNIDPTTGFVNLFHAQYENVDKAKSFFQKFDSISYNPKKDWFEFAFDYKNFTKKAEGSRSMWILCTHGSRIKNFRNSQKNGQWDSEEFALTEAFKSLFVRYEIDYTADLKTAIVDEKQKDFFVDLLKLFKLTVQMRNSWKEKDLDYLISPVAGADGRFFDTREGNKSLPKDADANGAYNIALKGLWALRQIRQTSEGGKLKLAISNKEWLQFVQERSYEKD

SEQ ID NO: 94 - protein, 1260 aa, Porphyromonas cansulci
MDSLKDFTNLYPVSKTLRFELKPVGKTLENIEKAGILKEDEHRAESYRRVKKIIDTYHKVFIDSSLENMAKMGIENEIKAMLQSFCELYKKDHRTEGEDKALDKIRAVLRGLIVGAFTGVCGRRENTVQNEKYESLFKEKLIKEILPDFVLSTEAESLPFSVEEATRSLKEFDSFTSYFAGFYENRKNIYSTKPQSTAIAYRLIHENLPKFIDNILVFQKIKEPIAKELEHIRADFSAGGYIKKDERLEDIFSLNYYIHVLSQAGIEKYNALIGKIVTEGDGEMKGLNEHINLYNQQRGREDRLPLFRPLYKQILSDREQLSYLPESFEKDEELLRALKEFYDHIAEDILGRTQQLMTSISEYDLSRIYVRNDSQLTDISKKMLGDWNAIYMARERAYDHEQAPKRITAKYERDRIKALKGEESISLANLNSCIAFLDNVRDCRVDTYLSTLGQKEGPHGLSNLVENVFASYHEAEQLLSFPYPEENNLIQDKDNVVLIKNLLDNISDLQRFLKPLWGMGDEPDKDERFYGEYNYIRGALDQVIPLYNKVRNYLTRKPYSTRKVKLNFGNSQLLSGWDRNKEKDNSCVILRKGQNFYLAIMNNRHKRSFENKVLPEYKEGEPYFEKMDYKFLPDPNKMLPKVFLSKKGIEIYKPSPKLLEQYGHGTHKKGDTFSMDDLHELIDFFKHSIEAHEDWKQFGFKFSDTATYENVSSFYREVEDQGYKLSFRKVSESYVYSLIDQGKLYLFQIYNKDFSPCSKGTPNLHTLYWRMLFDERNLADVIYKLDGKAEIFFREKSLKNDHPTHPAGKPIKKKSRQKKGEESLFEYDLVKDRRYTMDKFQFHVPITMNFKCSAGSKVNDMVNAHIREAKDMHVIGIDRGERNLLYICVIDSRGTILDQISLNTINDIDYHDLLESRDKDRQQERRNWQTIEGIKELKQGYLSQAVHRIAELMVAYKAVVALEDLNMGFKRGRQKVESSVYQQFEKQLIDKLNYLVDKKKRPEDIGGLLRAYQFTAPFKSFKEMGKQNGFLFYIPAWNTSNIDPTTGFVNLFHAQYENVDKAKSFFQKFDSISYNPKKDWFEFAFDYKNFTKKAEGSRSMWILCTHGSRIKNFRNSQKNGQWDSEEFALTEAFKSLFVRYEIDYTADLKTAIVDEKQKDFFVDLLKLFKLTVQMRNSWKEKDLDYLISPVAGADGRFFDTREGNKSLPKDADANGAYNIALKGLWALRQIRQTSEGGKLKLAISNKEWLQFVQERSYEKD

SEQ ID NO: 95 - protein, 1259 aa, Synergistes jonesii
MANSLKDFTNIYQLSKTLRFELKPIGKTEEHINRKLIIMHDEKRGEDYKSVTKLIDDYHRKFIHETLDPAHFDWNPLAEALIQSGSKNNKALPAEQKEMREKIISMFTSQAVYKKLFKKELFSELLPEMIKSELVSDLEKQAQLDAVKSFDKFSTYFTGFHENRKNIYSKKDTSTSIAFRIVHQNFPKFLANVRAYTLIKERAPEVIDKAQKELSGILGGKTLDDIFSIESFNNVLTQDKIDYYNQIIGGVSGKAGDKKLRGVNEFSNLYRQQHPEVASLRIKMVPLYKQILSDRTTLSFVPEALKDDEQAINAVDGLRSELERNDIFNRIKRLFGKNNLYSLDKIWIKNSSISAFSNELFKNWSFIEDALKEFKENEFNGARSAGKKAEKWLKSKYFSFADIDAAVKSYSEQVSADISSAPSASYFAKFTNLIETAAENGRKFSYFAAESKAFRGDDGKTEIIKAYLDSLNDILHCLKPFETEDISDIDTEFYSAFAEIYDSVKDVIPVYNAVRNYTTQKPFSTEKFKLNFENPALAKGWDKNKEQNNTAIILMKDGKYYLGVIDKNNKLRADDLADDGSAYGYMKMNYKFIPTPHMELPKVFLPKRAPKRYNPSREILLIKENKTFIKDKNFNRTDCHKLIDFFKDSINKHKDWRTFGFDFSDTDSYEDISDFYMEVQDQGYKLTFTRLSAEKIDKWVEEGRLFLFQIYNKDFADGAQGSPNLHTLYWKAIFSEENLKDVVLKLNGEAELFFRRKSIDKPAVHAKGSMKVNRRDIDGNPIDEGTYVEICGYANGKRDMASLNAGARGLIESGLVRITEVKHELVKDKRYTIDKYFFHVPFTINFKAQGQGNINSDVNLFLRNNKDVNIIGIDRGERNLVYVSLIDRDGHIKLQKDFNIIGGMDYHAKLNQKEKERDTARKSWKTIGTIKELKEGYLSQVVHEIVRLAVDNNAVIVMEDLNIGFKRGRFKVEKQVYQKFEKMLIDKLNYLVFKDAGYDAPCGILKGLQLTEKFESFTKLGKQCGIIFYIPAGYTSKIDPTTGFVNLFNINDVSSKEKQKDFIGKLDSIRFDAKRDMFTFEFDYDKFRTYQTSYRKKWAVWTNGKRIVREKDKDGKFRMNDRLLTEDMKNILNKYALAYKAGEDILPDVISRDKSLASEIFYVFKNTLQMRNSKRDTGEDFIISPVLNAKGRFFDSRKTDAALPIDADANGAYHIALKGSLVLDAIDEKLKEDGRIDYKDMAVSNPKWFEFMQTRKFDF

SEQ ID NO: 96 - protein, 1257 aa, Prevotella bryantii
MQINNLKIIYMKFTDFTGLYSLSKTLRFELKPIGKTLENIKKAGLLEQDQHRADSYKKVKKIIDEYHKAFIEKSLSNFELKYQSEDKLDSLEEYLMYYSMKRIEKTEKDKFAKIQDNLRKQIADHLKGDESYKTIFSKDLIRKNLPDFVKSDEERTLIKEFKDFTTYFKGFYENRENMYSAEDKSTAISHRIIHENLPKFVDNINAFSKIILIPELREKLNQIYQDFEEYLNVESIDEIFHLDYFSMVMTQKQIEVYNAIIGGKSTNDKKIQGLNEYINLYNQKHKDCKLPKLKLLFKQILSDRIAISWLPDNFKDDQEALDSIDTCYKNLLNDGNVLGEGNLKLLLENIDTYNLKGIFIRNDLQLTDISQKMYASWNVIQDAVILDLKKQVSRKKKESAEDYNDRLKKLYTSQESFSIQYLNDCLRAYGKTENIQDYFAKLGAVNNEHEQTINLFAQVRNAYTSVQAILTTPYPENANLAQDKETVALIKNLLDSLKRLQRFIKPLLGKGDESDKDERFYGDFTPLWETLNQITPLYNMVRNYMTRKPYSQEKIKLNFENSTLLGGWDLNKEHDNTAIILRKNGLYYLAIMKKSANKIFDKDKLDNSGDCYEKMVYKLLPGANKMLPKVFFSKSRIDEFKPSENIIENYKKGTHKKGANFNLADCHNLIDFFKSSISKHEDWSKFNFHFSDTSSYEDLSDFYREVEQQGYSISFCDVSVEYINKMVEKGDLYLFQIYNKDFSEFSKGTPNMHTLYWNSLFSKENLNNIIYKLNGQAEIFFRKKSLNYKRPTHPAHQAIKNKNKCNEKKESIFDYDLVKDKRYTVDKFQFHVPITMNFKSTGNTNINQQVIDYLRTEDDTHIIGIDRGERHLLYLVVIDSHGKIVEQFTLNEIVNEYGGNIYRTNYHDLLDTREQNREKARESWQTIENIKELKEGYISQVIHKITDLMQKYHAVVVLEDLNMGFMRGRQKVEKQVYQKFEEMLINKLNYLVNKKADQNSAGGLLHAYQLTSKFESFQKLGKQSGFLFYIPAWNTSKIDPVTGFVNLFDTRYESIDKAKAFFGKFDSIRYNADKDWFEFAFDYNNFTTKAEGTRTNWTICTYGSRIRTFRNQAKNSQWDNEEIDLTKAYKAFFAKHGINIYDNIKEAIAMETEKSFFEDLLHLLKLTLQMRNSITGTTTDYLISPVHDSKGNFYDSRICDNSLPANADANGAYNIARKGLMLIQQIKDSTSSNRFKFSPITNKDWLIFAQEKPYLND

SEQ ID NO: 97 - protein, 1253 aa, Prevotella albensis
MNIKNFTGLYPLSKTLRFELKPIGKTKENIEKNGILTKDEQRAKDYLIVKGFIDEYHKQFIKDRLWDFKLPLESEGEKNSLEEYQELYELTKRNDAQEADFTEIKDNLRSSITEQLTKSGSAYDRIFKKEFIREDLVNFLEDEKDKNIVKQFEDFTTYFTGFYENRKNMYSSEEKSTAIAYRLIHQNLPKFMDNMRSFAKIANSSVSEHFSDIYESWKEYLNVNSIEEIFQLDYFSETLTQPHIEVYNYIIGKKVLEDGTEIKGINEYVNLYNQQQKDKSKRLPFLVPLYKQILSDREKLSWIAEEFDSDKKMLSAITESYNHLHNVLMGNENESLRNLLLNIKDYNLEKINITNDLSLTEISQNLFGRYDVFTNGIKNKLRVLTPRKKKETDENFEDRINKIFKTQKSFSIAFLNKLPQPEMEDGKPRNIEDYFITQGAINTKSIQKEDIFAQIENAYEDAQVFLQIKDTDNKLSQNKTAVEKIKTLLDALKELQHFIKPLLGSGEENEKDELFYGSFLAIWDELDTITPLYNKVRNWLTRKPYSTEKIKLNFDNAQLLGGWDVNKEHDCAGILLRKNDSYYLGIINKKTNHIFDTDITPSDGECYDKIDYKLLPGANKMLPKVFFSKSRIKEFEPSEAIINCYKKGTHKKGKNFNLTDCHRLINFFKTSIEKHEDWSKFGFKFSDTETYEDISGFYREVEQQGYRLTSHPVSASYIHSLVKEGKLYLFQIWNKDFSQFSKGTPNLHTLYWKMLFDKRNLSDVVYKLNGQAEVFYRKSSIEHQNRIIHPAQHPITNKNELNKKHTSTFKYDIIKDRRYTVDKFQFHVPITINFKATGQNNINPIVQEVIRQNGITHIIGIDRGERHLLYLSLIDLKGNIIKQMTLNEIINEYKGVTYKTNYHNLLEKREKERTEARHSWSSIESIKELKDGYMSQVIHKITDMMVKYNAIVVLEDLNGGFMRGRQKVEKQVYQKFEKKLIDKLNYLVDKKLDANEVGGVLNAYQLTNKFESFKKIGKQSGFLFYIPAWNTSKIDPITGFVNLFNTRYESIKETKVFWSKFDIIRYNKEKNWFEFVFDYNTFTTKAEGTRTKWTLCTHGTRIQTFRNPEKNAQWDNKEINLTESFKALFEKYKIDITSNLKESIMQETEKKFFQELHNLLHLTLQMRNSVTGTDIDYLISPVADEDGNFYDSRINGKNFPENADANGAYNIARKGLMLIRQIKQADPQKKFKFETITNKDWLKFAQDKPYLKD

SEQ ID NO: 98 - protein, 1250 aa, Smithella sp.
MQTLFENFTNQYPVSKTLRFELIPQGKTKDFIEQKGLLKKDEDRAEKYKKVKNIIDEYHKDFIEKSLNGLKLDGLEKYKTLYLKQEKDDKDKKAFDKEKENLRKQIANAFRNNEKFKTLFAKELIKNDLMSFACEEDKKNVKEFEAFTTYFTGFHQNRANMYVADEKRTAIASRLIHENLPKFIDNIKIFEKMKKEAPELLSPFNQTLKDMKDVIKGTTLEEIFSLDYFNKTLTQSGIDIYNSVIGGRTPEEGKTKIKGLNEYINTDFNQKQTDKKKRQPKFKQLYKQILSDRQSLSFIAEAFKNDTEILEAIEKFYVNELLHFSNEGKSTNVLDAIKNAVSNLESFNLTKMYFRSGASLTDVSRKVFGEWSIINRALDNYYATTYPIKPREKSEKYEERKEKWLKQDFNVSLIQTAIDEYDNETVKGKNSGKVIADYFAKFCDDKETDLIQKVNEGYIAVKDLLNTPCPENEKLGSNKDQVKQIKAFMDSIMDIMHFVRPLSLKDTDKEKDETFYSLFTPLYDHLTQTIALYNKVRNYLTQKPYSTEKIKLNFENSTLLGGWDLNKETDNTAIILRKDNLYYLGIMDKRHNRIFRNVPKADKKDFCYEKMVYKLLPGANKMLPKVFFSQSRIQEFTPSAKLLENYANETHKKGDNFNLNHCHKLIDFFKDSINKHEDWKNFDFRFSATSTYADLSGFYHEVEHQGYKISFQSVADSFIDDLVNEGKLYLFQIYNKDFSPFSKGKPNLHTLYWKMLFDENNLKDVVYKLNGEAEVFYRKKSIAEKNTTIHKANESIINKNPDNPKATSTFNYDIVKDKRYTIDKFQFHIPITMNFKAEGIFNMNQRVNQFLKANPDINIIGIDRGERHLLYYALINQKGKILKQDTLNVIANEKQKVDYHNLLDKKEGDRATARQEWGVIETIKELKEGYLSQVIHKLTDLMIENNAIIVMEDLNFGFKRGRQKVEKQVYQKFEKMLIDKLNYLVDKNKKANELGGLLNAFQLANKFESFQKMGKQNGFIFYVPAWNTSKTDPATGFIDFLKPRYENLNQAKDFFEKFDSIRLNSKADYFEFAFDFKNFTEKADGGRTKWTVCTTNEDRYAWNRALNNNRGSQEKYDITAELKSLFDGKVDYKSGKDLKQQIASQESADFFKALMKNLSITLSLRHNNGEKGDNEQDYILSPVADSKGRFFDSRKADDDMPKNADANGAYHIALKGLWCLEQISKTDDLKKVKLAISNKEWLEFVQTLKG

SEQ ID NO: 99 - protein, 1250 aa, Smithella sp.
MQTLFENFTNQYPVSKTLRFELIPQGKTKDFIEQKGLLKKDEDRAEKYKKVKNIIDEYHKDFIEKSLNGLKLDGLEEYKTLYLKQEKDDKDKKAFDKEKENLRKQIANAFRNNEKFKTLFAKELIKNDLMSFACEEDKKNVKEFEAFTTYFTGFHQNRANMYVADEKRTAIASRLIHENLPKFIDNIKIFEKMKKEAPELLSPFNQTLKDMKDVIKGTTLEEIFSLDYFNKTLTQSGIDIYNSVIGGRTPEEGKTKIKGLNEYINTDFNQKQTDKKKRQPKFKQLYKQILSDRQSLSFIAEAFKNDTEILEAIEKFYVNELLHFSNEGKSTNVLDAIKNAVSNLESFNLTKIYFRSGTSLTDVSRKVFGEWSIINRALDNYYATTYPIKPREKSEKYEERKEKWLKQDFNVSLIQTAIDEYDNETVKGKNSGKVIVDYFAKFCDDKETDLIQKVNEGYIAVKDLLNTPYPENEKLGSNKDQVKQIKAFMDSIMDIMHFVRPLSLKDTDKEKDETFYSLFTPLYDHLTQTIALYNKVRNYLTQKPYSTEKIKLNFENSTLLGGWDLNKETDNTAIILRKENLYYLGIMDKRHNRIFRNVPKADKKDSCYEKMVYKLLPGANKMLPKVFFSQSRIQEFTPSAKLLENYENETHKKGDNFNLNHCHQLIDFFKDSINKHEDWKNFDFRFSATSTYADLSGFYHEVEHQGYKISFQSIADSFIDDLVNEGKLYLFQIYNKDFSPFSKGKPNLHTLYWKMLFDENNLKDVVYKLNGEAEVFYRKKSIAEKNTTIHKANESIINKNPDNPKATSTFNYDIVKDKRYTIDKFQFHVPITMNFKAEGIFNMNQRVNQFLKANPDINIIGIDRGERHLLYYTLINQKGKILKQDTLNVIANEKQKVDYHNLLDKKEGDRATARQEWGVIETIKELKEGYLSQVIHKLTDLMIENNAIIVMEDLNFGFKRGRQKVEKQVYQKFEKMLIDKLNYLVDKNKKANELGGLLNAFQLANKFESFQKMGKQNGFIFYVPAWNTSKTDPATGFIDFLKPRYENLKQAKDFFEKFDSIRLNSKADYFEFAFDFKNFTGKADGGRTKWTVCTTNEDRYAWNRALNNNRGSQEKYDITAELKSLFDGKVDYKSGKDLKQQIASQELADFFRTLMKYLSVTLSLRHNNGEKGETEQDYILSPVADSMGKFFDSRKAGDDMPKNADANGAYHIALKGLWCLEQISKTDDLKKVKLAISNKEWLEFMQTLKG

SEQ ID NO: 100 - protein, 1247 aa, Prevotella bryantii
MKFTDFTGLYSLSKTLRFELKPIGKTLENIKKAGLLEQDQHRADSYKKVKKIIDEYHKAFIEKSLSNFELKYQSEDKLDSLEEYLMYYSMKRIEKTEKDKFAKIQDNLRKQIADHLKGDESYKTIFSKDLIRKNLPDFVKSDEERTLIKEFKDFTTYFKGFYENRENMYSAEDKSTAISHRIIHENLPKFVDNINAFSKIILIPELREKLNQIYQDFEEYLNVESIDEIFHLDYFSMVMTQKQIEVYNAIIGGKSTNDKKIQGLNEYINLYNQKHKDCKLPKLKLLFKQILSDRIAISWLPDNFKDDQEALDSIDTCYKNLLNDGNVLGEGNLKLLLENIDTYNLKGIFIRNDLQLTDISQKMYASWNVIQDAVILDLKKQVSRKKKESAEDYNDRLKKLYTSQESFSIQYLNDCLRAYGKTENIQDYFAKLGAVNNEHEQTINLFAQVRNAYTSVQAILTTPYPENANLAQDKETVALIKNLLDSLKRLQRFIKPLLGKGDESDKDERFYGDFTPLWETLNQITPLYNMVRNYMTRKPYSQEKIKLNFENSTLLGGWDLNKEHDNTAIILRKNGLYYLAIMKKSANKIFDKDKLDNSGDCYEKMVYKLLPGANKMLPKVFFSKSRIDEFKPSENIIENYKKGTHKKGANFNLADCHNLIDFFKSSISKHEDWSKFNFHFSDTSSYEDLSDFYREVEQQGYSISFCDVSVEYINKMVEKGDLYLFQIYNKDFSEFSKGTPNMHTLYWNSLFSKENLNNIIYKLNGQAEIFFRKKSLNYKRPTHPAHQAIKNKNKCNEKKESIFDYDLVKDKRYTVDKFQFHVPITMNFKSTGNTNINQQVIDYLRTEDDTHIIGIDRGERHLLYLVVIDSHGKIVEQFTLNEIVNEYGGNIYRTNYHDLLDTREQNREKARESWQTIENIKELKEGYISQVIHKITDLMQKYHAVVVLEDLNMGFMRGRQKVEKQVYQKFEEMLINKLNYLVNKKADQNSAGGLLHAYQLTSKFESFQKLGKQSGFLFYIPAWNTSKIDPVTGFVNLFDTRYESIDKAKAFFGKFDSIRYNADKDWFEFAFDYNNFTTKAEGTRTNWTICTYGSRIRTFRNQAKNSQWDNEEIDLTKAYKAFFAKHGINIYDNIKEAIAMETEKSFFEDLLHLLKLTLQMRNSITGTTTDYLISPVHDSKGNFYDSRICDNSLPANADANGAYNIARKGLMLIQQIKDSTSSNRFKFSPITNKDWLIFAQEKPYLND

SEQ ID NO: 101 - protein, 1247 aa, Artificial Sequence
  Description of Artificial Sequence: Synthetic polypeptide
MFKGDAFTGLYEVQKTLRFELVPIGLTQSYLENDWVIQKDKEVEENYGKIKAYFDLIHKEFVRQSLENAWLCQLDDFYEKYIELHNSLETRKDKNLAKQFEKVMKSLKKEFVSFFDAKWNEWKQKFSFLKKWWIDVLNEKEVLDLMAEFYPDEKELFDKFDKFFTYFSNFKESRKNFYADDGRAWAIATRAIDENLITFIKNIEDFKKLNSSFREFVNDNFSEEDKQIFEIDFYNNCLLQPWIDKYNKIVWWYSLENWEKVQWLNEKINNFKQNQNKSNSKDLKFPRMKLLYKQILGDKEKKVYIDEIRDDKNLIDLIDNSKRRNQIKIDNANDIINDFINNNAKFELDKIYLTRQSINTISSKYFSSWDYIRWYFWTGELQEFVSFYDLKETFWKIEYETLENIFKDCYVKGINTESQNNIVFETQGIYENFLNIFKFEFNQNISQISLLEWELDKIQNEDIKKNEKQVEVIKNYFDSVMSVYKMTKYFSLEKWKKRVELDTDNNFYNDFNEYLEGFEIWKDYNLVRNYITKKQVNTDKIKLNFDNSQFLTWWDKDKENERLGIILRREWKYYLWILKKWNTLNFGDYLQKEWEIFYEKMNYKQLNNVYRQLPRLLFPLTKKLNELKWDELKKYLSKYIQNFWYNEEIAQIKIEFDIFQESKEKWEKFDIDKLRKLIEYYKKWVLALYSDLYDLEFIKYKNYDDLSIFYSDVEKKMYNLNFTKIDKSLIDGKVKSWELYLFQIYNKDFSESKKEWSTENIHTKYFKLLFNEKNLQNLVVKLSWWADIFFRDKTENLKFKKDKNGQEILDHRRFSQDKIMFHISITLNANCWDKYWFNQYVNEYMNKERDIKIIWIDRWEKHLAYYCVIDKSWKIFNNEIWTLNELNWVNYLEKLEKIESSRKDSRISWWEIENIKELKNGYISQVINKLTELIVKYNAIIVFEDLNIWFKRWRQKIEKQIYQKLELALAKKLNYLTQKDKKDDEILWNLKALQLVPKVNDYQDIWNYKQSWIMFYVRANYTSVTCPNCWLRKNLYISNSATKENQKKSLNSIAIKYNDWKFSFSYEIDDKSWKQKQSLNKKKFIVYSDIERFVYSPLEKLTKVIDVNKKLLELFRDFNLSLDINKQIQEKDLDSVFFKSLTHLFNLILQLRNSDSKDNKDYISCPSCYYHSNNWLQWFEFNWDANWAYNIARKGIILLDRIRKNQEKPDLYVSDIDWDNFVQSNQFPNTIIPIQNIEKQVPLNIKI

SEQ ID NO: 102 - protein, 1246 aa, Porphyromonas macacae
MKTQHFFEDFTSLYSLSKTIRFELKPIGKTLENIKKNGLIRRDEQRLDDYEKLKKVIDEYHEDFIANILSSFSFSEEILQSYIQNLSESEARAKIEKTMRDTLAKAFSEDERYKSIFKKELVKKDIPVWCPAYKSLCKKFDNFTTSLVPFHENRKNLYTSNEITASIPYRIVHVNLPKFIQNIEALCELQKKMGADLYLEMMENLRNVWPSFVKTPDDLCNLKTYNHLMVQSSISEYNRFVGGYSTEDGTKHQGINEWINIYRQRNKEMRLPGLVFLHKQILAKVDSSSFISDTLENDDQVFCVLRQFRKLFWNTVSSKEDDAASLKDLFCGLSGYDPEAIYVSDAHLATISKNIFDRWNYISDAIRRKTEVLMPRKKESVERYAEKISKQIKKRQSYSLAELDDLLAHYSEESLPAGFSLLSYFTSLGGQKYLVSDGEVILYEEGSNIWDEVLIAFRDLQVILDKDFTEKKLGKDEEAVSVIKKALDSALRLRKFFDLLSGTGAEIRRDSSFYALYTDRMDKLKGLLKMYDKVRNYLTKKPYSIEKFKLHFDNPSLLSGWDKNKELNNLSVIFRQNGYYYLGIMTPKGKNLFKTLPKLGAEEMFYEKMEYKQIAEPMLMLPKVFFPKKTKPAFAPDQSVVDIYNKKTFKTGQKGFNKKDLYRLIDFYKEALTVHEWKLFNFSFSPTEQYRNIGEFFDEVREQAYKVSMVNVPASYIDEAVENGKLYLFQIYNKDFSPYSKGIPNLHTLYWKALFSEQNQSRVYKLCGGGELFYRKASLHMQDTTVHPKGISIHKKNLNKKGETSLFNYDLVKDKRFTEDKFFFHVPISINYKNKKITNVNQMVRDYIAQNDDLQIIGIDRGERNLLYISRIDTRGNLLEQFSLNVIESDKGDLRTDYQKILGDREQERLRRRQEWKSIESIKDLKDGYMSQVVHKICNMVVEHKAIVVLENLNLSFMKGRKKVEKSVYEKFERMLVDKLNYLVVDKKNLSNEPGGLYAAYQLTNPLFSFEELHRYPQSGILFFVDPWNTSLTDPSTGFVNLLGRINYTNVGDARKFFDRFNAIRYDGKGNILFDLDLSRFDVRVETQRKLWTLTTFGSRIAKSKKSGKWMVERIENLSLCFLELFEQFNIGYRVEKDLKKAILSQDRKEFYVRLIYLFNLMMQIRNSDGEEDYILSPALNEKNLQFDSRLIEAKDLPVDADANGAYNVARKGLMVVQRIKRGDHESIHRIGRAQWLRYVQEGIVE

SEQ ID NO: 103 - protein, 1241 aa, Butyrivibrio proteoclasticus
MLLYENYTKRNQITKSLRLELRPQGKTLRNIKELNLLEQDKAIYALLERLKPVIDEGIKDIARDTLKNCELSFEKLYEHFLSGDKKAYAKESERLKKEIVKTLIKNLPEGIGKISEINSAKYLNGVLYDFIDKTHKDSEEKQNILSDILETKGYLALFSKFLTSRITTLEQSMPKRVIENFEIYAANIPKMQDALERGAVSFAIEYESICSVDYYNQILSQEDIDSYNRLISGIMDEDGAKEKGINQTISEKNIKIKSEHLEEKPFRILKQLHKQILEEREKAFTIDHIDSDEEVVQVTKEAFEQTKEQWENIKKINGFYAKDPGDITLFIVVGPNQTHVLSQLIYGEHDRIRLLLEEYEKNTLEVLPRRTKSEKARYDKFVNAVPKKVAKESHTFDGLQKMTGDDRLFILYRDELARNYMRIKEAYGTFERDILKSRRGIKGNRDVQESLVSFYDELTKFRSALRIINSGNDEKADPIFYNTFDGIFEKANRTYKAENLCRNYVTKSPADDARIMASCLGTPARLRTHWWNGEENFAINDVAMIRRGDEYYYFVLTPDVKPVDLKTKDETDAQIFVQRKGAKSFLGLPKALFKCILEPYFESPEHKNDKNCVIEEYVSKPLTIDRRAYDIFKNGTFKKTNIGIDGLTEEKFKDDCRYLIDVYKEFIAVYTRYSCFNMSGLKRADEYNDIGEFFSDVDTRLCTMEWIPVSFERINDMVDKKEGLLFLVRSMFLYNRPRKPYERTFIQLFSDSNMEHTSMLLNSRAMIQYRAASLPRRVTHKKGSILVALRDSNGEHIPMHIREAIYKMKNNFDISSEDFIMAKAYLAEHDVAIKKANEDIIRNRRYTEDKFFLSLSYTKNADISARTLDYINDKVEEDTQDSRMAVIVTRNLKDLTYVAVVDEKNNVLEEKSLNEIDGVNYRELLKERTKIKYHDKTRLWQYDVSSKGLKEAYVELAVTQISKLATKYNAVVVVESMSSTFKDKFSFLDEQIFKAFEARLCARMSDLSFNTIKEGEAGSISNPIQVSNNNGNSYQDGVIYFLNNAYTRTLCPDTGFVDVFDKTRLITMQSKRQFFAKMKDIRIDDGEMLFTFNLEEYPTKRLLDRKEWTVKIAGDGSYFDKDKGEYVYVNDIVREQIIPALLEDKAVFDGNMAEKFLDKTAISGKSVELIYKWFANALYGIITKKDGEKIYRSPITGTEIDVSKNTTYNFGKKFMFKQEYRGDGDFLDAFLNYMQAQDIAV

SEQ ID NO: 104 - protein, 1238 aa, Candidatus Methanoplasma
MNNYDEFTKLYPIQKTIRFELKPQGRTMEHLETFNFFEEDRDRAEKYKILKEAIDEYHKKFIDEHLTNMSLDWNSLKQISEKYYKSREEKDKKVFLSEQKRMRQEIVSEFKKDDRFKDLFSKKLFSELLKEEIYKKGNHQEIDALKSFDKFSGYFIGLHENRKNMYSDGDEITAISNRIVNENFPKFLDNLQKYQEARKKYPEWIIKAESALVAHNIKMDEVFSLEYFNKVLNQEGIQRYNLALGGYVTKSGEKMMGLNDALNLAHQSEKSSKGRIHMTPLFKQILSEKESFSYIPDVFTEDSQLLPSIGGFFAQIENDKDGNIFDRALELISSYAEYDTERIYIRQADINRVSNVIFGEWGTLGGLMREYKADSINDINLERTCKKVDKWLDSKEFALSDVLEAIKRTGNNDAFNEYISKMRTAREKIDAARKEMKFISEKISGDEESIHIIKTLLDSVQQFLHFFNLFKARQDIPLDGAFYAEFDEVHSKLFAIVPLYNKVRNYLTKNNLNTKKIKLNFKNPTLANGWDQNKVYDYASLIFLRDGNYYLGIINPKRKKNIKFEQGSGNGPFYRKMVYKQIPGPNKNLPRVFLTSTKGKKEYKPSKEIIEGYEADKHIRGDKFDLDFCHKLIDFFKESIEKHKDWSKFNFYFSPTESYGDISEFYLDVEKQGYRMHFENISAETIDEYVEKGDLFLFQIYNKDFVKAATGKKDMHTIYWNAAFSPENLQDVVVKLNGEAELFYRDKSDIKEIVHREGEILVNRTYNGRTPVPDKIHKKLTDYHNGRTKDLGEAKEYLDKVRYFKAHYDITKDRRYLNDKIYFHVPLTLNFKANGKKNLNKMVIEKFLSDEKAHIIGIDRGERNLLYYSIIDRSGKIIDQQSLNVIDGFDYREKLNQREIEMKDARQSWNAIGKIKDLKEGYLSKAVHEITKMAIQYNAIVVMEELNYGFKRGRFKVEKQIYQKFENMLIDKMNYLVFKDAPDESPGGVLNAYQLTNPLESFAKLGKQTGILFYVPAAYTSKIDPTTGFVNLFNTSSKTNAQERKEFLQKFESISYSAKDGGIFAFAFDYRKFGTSKTDHKNVWTAYTNGERMRYIKEKKRNELFDPSKEIKEALTSSGIKYDGGQNILPDILRSNNNGLIYTMYSSFIAAIQMRVYDGKEDYIISPIKNSKGEFFRTDPKRRELPIDADANGAYNIALRGELTMRAIAEKFDPDSEKMAKLELKHKDWFEFMQTRGD

SEQ ID NO: 105 - protein, 1235 aa, Anaerovibrio sp.
MVAFIDEFVGQYPVSKTLRFEARPVPETKKWLESDQCSVLFNDQKRNEYYGVLKELLDDYYRAYIEDALTSFTLDKALLENAYDLYCNRDTNAFSSCCEKLRKDLVKAFGNLKDYLLGSDQLKDLVKLKAKVDAPAGKGKKKIEVDSRLINWLNNNAKYSAEDREKYIKAIESFEGFVTYLTNYKQARENMFSSEDKSTAIAFRVIDQNMVTYFGNIRIYEKIKAKYPELYSALKGFEKFFSPTAYSEILSQSKIDEYNYQCIGRPIDDADFKGVNSLINEYRQKNGIKARELPVMSMLYKQILSDRDNSFMSEVINRNEEAIECAKNGYKVSYALFNELLQLYKKIFTEDNYGNIYVKTQPLTELSQALFGDWSILRNALDNGKYDKDIINLAELEKYFSEYCKVLDADDAAKIQDKFNLKDYFIQKNALDATLPDLDKITQYKPHLDAMLQAIRKYKLFSMYNGRKKMDVPENGIDFSNEFNAIYDKLSEFSILYDRIRNFATKKPYSDEKMKLSFNMPTMLAGWDYNNETANGCFLFIKDGKYFLGVADSKSKNIFDFKKNPHLLDKYSSKDIYYKVKYKQVSGSAKMLPKVVFAGSNEKIFGHLISKRILEIREKKLYTAAAGDRKAVAEWIDFMKSAIAIHPEWNEYFKFKFKNTAEYDNANKFYEDIDKQTYSLEKVEIPTEYIDEMVSQHKLYLFQLYTKDFSDKKKKKGTDNLHTMYWHGVFSDENLKAVTEGTQPIIKLNGEAEMFMRNPSIEFQVTHEHNKPIANKNPLNTKKESVFNYDLIKDKRYTERKFYFHCPITLNFRADKPIKYNEKINRFVENNPDVCIIGIDRGERHLLYYTVINQTGDILEQGSLNKISGSYTNDKGEKVNKETDYHDLLDRKEKGKHVAQQAWETIENIKELKAGYLSQVVYKLTQLMLQYNAVIVLENLNVGFKRGRTKVEKQVYQKFEKAMIDKLNYLVFKDRGYEMNGSYAKGLQLTDKFESFDKIGKQTGCIYYVIPSYTSHIDPKTGFVNLLNAKLRYENITKAQDTIRKFDSISYNAKADYFEFAFDYRSFGVDMARNEWVVCTCGDLRWEYSAKTRETKAYSVTDRLKELFKAHGIDYVGGENLVSHITEVADKHFLSTLLFYLRLVLKMRYTVSGTENENDFILSPVEYAPGKFFDSREATSTEPMNADANGAYHIALKGLMTIRGIEDGKLHNYGKGGENAAWFKFMQNQEYKNNG

SEQ ID NO: 106 - protein, 1233 aa, Lachnospiraceae bacterium
MDYGNGQFERRAPLTKTITLRLKPIGETRETIREQKLLEQDAAFRKLVETVTPIVDDCIRKIADNALCHFGTEYDFSCLGNAISKNDSKAIKKETEKVEKLLAKVLTENLPDGLRKVNDINSAAFIQDTLTSFVQDDADKRVLIQELKGKTVLMQRFLTTRITALTVWLPDRVFENFNIFIENAEKMRILLDSPLNEKIMKFDPDAEQYASLEFYGQCLSQKDIDSYNLIISGIYADDEVKNPGINEIVKEYNQQIRGDKDESPLPKLKKLHKQILMPVEKAFFVRVLSNDSDARSILEKILKDTEMLPSKIIEAMKEADAGDIAVYGSRLHELSHVIYGDHGKLSQIIYDKESKRISELMETLSPKERKESKKRLEGLEEHIRKSTYTFDELNRYAEKNVMAAYIAAVEESCAEIMRKEKDLRTLLSKEDVKIRGNRHNTLIVKNYFNAWTVFRNLIRILRRKSEAEIDSDFYDVLDDSVEVLSLTYKGENLCRSYITKKIGSDLKPEIATYGSALRPNSRWWSPGEKFNVKFHTIVRRDGRLYYFILPKGAKPVELEDMDGDIECLQMRKIPNPTIFLPKLVFKDPEAFFRDNPEADEFVFLSGMKAPVTITRETYEAYRYKLYTVGKLRDGEVSEEEYKRALLQVLTAYKEFLENRMIYADLNFGFKDLEEYKDSSEFIKQVETHNTFMCWAKVSSSQLDDLVKSGNGLLFEIWSERLESYYKYGNEKVLRGYEGVLLSILKDENLVSMRTLLNSRPMLVYRPKESSKPMVVHRDGSRVVDRFDKDGKYIPPEVHDELYRFFNNLLIKEKLGEKARKILDNKKVKVKVLESERVKWSKFYDEQFAVTFSVKKNADCLDTTKDLNAEVMEQYSESNRLILIRNTTDILYYLVLDKNGKVLKQRSLNIINDGARDVDWKERFRQVTKDRNEGYNEWDYSRTSNDLKEVYLNYALKEIAEAVIEYNAILIIEKMSNAFKDKYSFLDDVTFKGFETKLLAKLSDLHFRGIKDGEPCSFTNPLQLCQNDSNKILQDGVIFMVPNSMTRSLDPDTGFIFAINDHNIRTKKAKLNFLSKFDQLKVSSEGCLIMKYSGDSLPTHNTDNRVWNCCCNHPITNYDRETKKVEFIEEPVEELSRVLEENGIETDTELNKLNERENVPGKVVDAIYSLVLNYLRGTVSGVAGQRAVYYSPVTGKKYDISFIQAMNLNRKCDYYRIGSKERGEWTDFVAQLIN

SEQ ID NO: 107 - protein, 1231 aa, Butyrivibrio fibrisolvens
MYYESLTKLYPIKKTIRNELVPIGKTLENIKKNNILEADEDRKIAYIRVKAIMDDYHKRLINEALSGFALIDLDKAANLYLSRSKSADDIESFSRFQDKLRKAIAKRLREHENFGKIGNKDIIPLLQKLSENEDDYNALESFKNFYTYFESYNDVRLNLYSDKEKSSTVAYRLINENLPRFLDNIRAYDAVQKAGITSEELSSEAQDGLFLVNTFNNVLIQDGINTYNEDIGKLNVAINLYNQKNASVQGFRKVPKMKVLYKQILSDREESFIDEFESDTELLDSLESHYANLAKYFGSNKVQLLFTALRESKGVNVYVKNDIAKTSFSNVVFGSWSRIDELINGEYDDNNNRKKDEKYYDKRQKELKKNKSYTIEKIITLSTEDVDVIGKYIEKLESDIDDIRFKGKNFYEAVLCGHDRSKKLSKNKGAVEAIKGYLDSVKDFERDLKLINGSGQELEKNLVVYGEQEAVLSELSGIDSLYNMTRNYLTKKPFSTEKIKLNFNKPTFLDGWDYGNEEAYLGFFMIKEGNYFLAVMDANWNKEFRNIPSVDKSDCYKKVIYKQISSPEKSIQNLMVIDGKTVKKNGRKEKEGIHSGENLILEELKNTYLPKKINDIRKRRSYLNGDTFSKKDLTEFIGYYKQRVIEYYNGYSFYFKSDDDYASFKEFQEDVGRQAYQISYVDVPVSFVDDLINSGKLYLFRVYNKDFSEYSKGRLNLHTLYFKMLFDERNLKNVVYKLNGQAEVFYRPSSIKKEELIVHRAGEEIKNKNPKRAAQKPTRRLDYDIVKDRRYSQDKFMLHTSIIMNFGAEENVSFNDIVNGVLRNEDKVNVIGIDRGERNLLYVVVIDPEGKILEQRSLNCITDSNLDIETDYHRLLDEKESDRKIARRDWTTIENIKELKAGYLSQVVHIVAELVLKYNAIICLEDLNFGFKRGRQKVEKQVYQKFEKMLIDKLNYLVMDKSREQLSPEKISGALNALQLTPDFKSFKVLGKQTGIIYYVPAYLTSKIDPMTGFANLFYVKYENVDKAKEFFSKFDSIKYNKDGKNWNTKGYFEFAFDYKKFTDRAYGRVSEWTVCTVGERIIKFKNKEKNNSYDDKVIDLTNSLKELFDSYKVTYESEVDLKDAILAIDDPAFYRDLTRRLQQTLQMRNSSCDGSRDYIISPVKNSKGEFFCSDNNDDTTPNDADANGAFNIARKGLWVLNEIRNSEEGSKINLAMSNAQWLEYAQDNTI

SEQ ID NO: 108 - protein, 1230 aa, Artificial Sequence
  Description of Artificial Sequence: Synthetic polypeptide
MHENNGKIADNFIGIYPVSKTLRFELKPVGKTQEYIEKHGILDEDLKRAGDYKSVKKIIDAYHKYFIDEALNGIQLDGLKNYYELYEKKRDNNEEKEFQKIQMSLRKQIVKRFSEHPQYKYLFKKELIKNVLPEFTKDNAEEQTLVKSFQEFTTYFEGFHQNRKNMYSDEEKSTAIAYRVVHQNLPKYIDNMRIFSMILNTDIRSDLTELFNNLKTKMDITIVEEYFAIDGFNKVVNQKGIDVYNTILGAFSTDDNTKIKGLNEYINLYNQKNKAKLPKLKPLFKQILSDRDKISFIPEQFDSDTEVLEAVDMFYNRLLQFVIENEGQITISKLLTNFSAYDLNKIYVKNDTTISAISNDLFDDWSYISKAVRENYDSENVDKNKRAAAYEEKKEKALSKIKMYSIEELNFFVKKYSCNECHIEGYFERRILEILDKMRYAYESCKILHDKGLINNISLCQDRQAISELKDFLDSIKEVQWLLKPLMIGQEQADKEEAFYTELLRIWEELEPITLLYNKVRNYVTKKPYTLEKVKLNFYKSTLLDGWDKNKEKDNLGIILLKDGQYYLGIMNRRNNKIADDAPLAKTDNVYRKMEYKLLTKVSANLPRIFLKDKYNPSEEMLEKYEKGTHLKGENFCIDDCRELIDFFKKGIKQYEDWGQFDFKFSDTESYDDISAFYKEVEHQGYKITFRDIDETYIDSLVNEGKLYLFQIYNKDFSPYSKGTKNLHTLYWEMLFSQQNLQNIVYKLNGNAEIFYRKASINQKDVVVHKADLPIKNKDPQNSKKESMFDYDIIKDKRFTCDKYQFHVPITMNFKALGENHFNRKVNRLIHDAENMHIIGIDRGERNLIYLCMIDMKGNIVKQISLNEIISYDKNKLEHKRNYHQLLKTREDENKSARQSWQTIHTIKELKEGYLSQVIHVITDLMVEYNAIVVLEDLNFGFKQGRQKFERQVYQKFEKMLIDKLNYLVDKSKGMDEDGGLLHAYQLTDEFKSFKQLGKQSGFLYYIPAWNTSKLDPTTGFVNLFYTKYESVEKSKEFINNFTSILYNQEREYFEFLFDYSAFTSKAEGSRLKWTVCSKGERVETYRNPKKNNEWDTQKIDLTFELKKLFNDYSISLLDGDLREQMGKIDKADFYKKFMKLFALIVQMRNSDEREDKLISPVLNKYGAFFETGKNERMPLDADANGAYNIARKGLWIIEKIKNTDVEQLDKVKLTISNKEWLQYAQEHIL

SEQ ID NO: 109 - protein, 1228 aa, Artificial Sequence
  Description of Artificial Sequence: Synthetic polypeptide
MSKLEKFTNCYSLSKTLRFKAIPVGKTQENIDNKRLLVEDEKRAEDYKGVKKLLDRYYLSFINDVLHSIKLKNLNNYISLFRKKTRTEKENKELENLEINLRKEIAKAFKGNEGYKSLFKKDIIETILPEFLDDKDEIALVNSFNGFTTAFTGFFDNRENMFSEEAKSTSIAFRCINENLTRYISNMDIFEKVDAIFDKHEVQEIKEKILNSDYDVEDFFEGEFFNFVLTQEGIDVYNAIIGGFVTESGEKIKGLNEYINLYNQKTKQKLPKFKPLYKQVLSDRESLSFYGEGYTSDEEVLEVFRNTLNKNSEIFSSIKKLEKLFKNFDEYSSAGIFVKNGPAISTISKDIFGEWNVIRDKWNAEYDDIHLKKKAVVTEKYEDDRRKSFKKIGSFSLEQLQEYADADLSVVEKLKEIIIQKVDEIYKVYGSSEKLFDADFVLEKSLKKNDAVVAIMKDLLDSVKSFENYIKAFFGEGKETNRDESFYGDFVLAYDILLKVDHIYDAIRNYVTQKPYSKDKFKLYFQNPQFMGGWDKDKETDYRATILRYGSKYYLAIMDKKYAKCLQKIDKDDVNGNYEKINYKLLPGPNKMLPKVFFSKKWMAYYNPSEDIQKIYKNGTFKKGDMFNLNDCHKLIDFFKDSISRYPKWSNAYDFNFSETEKYKDIAGFYREVEEQGYKVSFESASKKEVDKLVEEGKLYMFQIYNKDFSDKSHGTPNLHTMYFKLLFDENNHGQIRLSGGAELFMRRASLKKEELVVHPANSPIANKNPDNPKKTTTLSYDVYKDKRFSEDQYELHIPIAINKCPKNIFKINTEVRVLLKHDDNPYVIGIDRGERNLLYIVVVDGKGNIVEQYSLNEIINNFNGIRIKTDYHSLLDKKEKERFEARQNWTSIENIKELKAGYISQVVHKICELVEKYDAVIALEDLNSGFKNSRVKVEKQVYQKFEKMLIDKLNYMVDKKSNPCATGGALKGYQITNKFESFKSMSTQNGFIFYIPAWLTSKIDPSTGFVNLLKTKYTSIADSKKFISSFDRIMYVPEEDLFEFALDYKNFSRTDADYIKKWKLYSYGNRIRIFRNPKKNNVFDWEEVCLTSAYKELFNKYGINYQQGDIRALLCEQSDKAFYSSFMALMSLMLQMRNSITGRTDVDFLISPVKNSDGIFYDSRNYEAQENAILPKNADANGAYNIARKVLWAIGQFKKAEDEKLDKVKIAISNKEWLEYAQTSVKH

SEQ ID NO: 110 - protein, 1227 aa, Candidatus Methanomethylophilus
MDAKEFTGQYPLSKTLRFELRPIGRTWDNLEASGYLAEDRHRAECYPRAKELLDDNHRAFLNRVLPQIDMDWHPIAEAFCKVHKNPGNKELAQDYNLQLSKRRKEISAYLQDADGYKGLFAKPALDEAMKIAKENGNESDIEVLEAFNGFSVYFTGYHESRENIYSDEDMVSVAYRITEDNFPRFVSNALIFDKLNESHPDIISEVSGNLGVDDIGKYFDVSNYNNFLSQAGIDDYNHIIGGHTTEDGLIQAFNVVLNLRHQKDPGFEKIQFKQLYKQILSVRTSKSYIPKQFDNSKEMVDCICDYVSKIEKSETVERALKLVRNISSFDLRGIFVNKKNLRILSNKLIGDWDAIETALMHSSSSENDKKSVYDSAEAFTLDDIFSSVKKFSDASAEDIGNRAEDICRVISETAPFINDLRAVDLDSLNDDGYEAAVSKIRESLEPYMDLFHELEIFSVGDEFPKCAAFYSELEEVSEQLIEIIPLFNKARSFCTRKRYSTDKIKVNLKFPTLADGWDLNKERDNKAAILRKDGKYYLAILDMKKDLSSIRTSDEDESSFEKMEYKLLPSPVKMLPKIFVKSKAAKEKYGLTDRMLECYDKGMHKSGSAFDLGFCHELIDYYKRCIAEYPGWDVFDFKFRETSDYGSMKEFNEDVAGAGYYMSLRKIPCSEVYRLLDEKSIYLFQIYNKDYSENAHGNKNMHTMYWEGLFSPQNLESPVFKLSGGAELFFRKSSIPNDAKTVHPKGSVLVPRNDVNGRRIPDSIYRELTRYFNRGDCRISDEAKSYLDKVKTKKADHDIVKDRRFTVDKMMFHVPIAMNFKAISKPNLNKKVIDGIIDDQDLKIIGIDRGERNLIYVTMVDRKGNILYQDSLNILNGYDYRKALDVREYDNKEARRNWTKVEGIRKMKEGYLSLAVSKLADMIIENNAIIVMEDLNHGFKAGRSKIEKQVYQKFESMLINKLGYMVLKDKSIDQSGGALHGYQLANHVTTLASVGKQCGVIFYIPAAFTSKIDPTTGFADLFALSNVKNVASMREFFSKMKSVIYDKAEGKFAFTFDYLDYNVKSECGRTLWTVYTVGERFTYSRVNREYVRKVPTDIIYDALQKAGISVEGDLRDRIAESDGDTLKSIFYAFKYALDMRVENREEDYIQSPVKNASGEFFCSKNAGKSLPQDSDANGAYNIALKGILQLRMLSEQYDPNAESIRLPLITNKAWLTFMQSGMKTWKN

SEQ ID NO: 111 - protein, 1224 aa, Artificial Sequence
  Description of Artificial Sequence: Synthetic polypeptide
MGLYDGFVNRYSVSKTLRFELIPQGRTREYIETNGILSDDEERAKDYKTIKRLIDEYHKDYISRCLKNVNISCLEEYYHLYNSSNRDKRHEELDALSDQMRGEIASFLTGNDEYKEQKSRDIIINERIINFASTDEELAAVKRFRKFTSYFTGFFTNRENMYSAEKKSTAIAHRIIDVNLPKYVDNIKAFNTAIEAGVFDIAEFESNFKAITDEHEVSDLLDITKYSRFIRNEDIIIYNTLLGGISMKDEKIQGLNELINLHNQKHPGKKVPLLKVLYKQILGDSQTHSFVDDQFEDDQQVINAVKAVTDTFSETLLGSLKIIINNIGHYDLDRIYIKAGQDITTLSKRALNDWHIITECLESEYDDKFPKNKKSDTYEEMRNRYVKSFKSFSIGRLNSLVTTYTEQACFLENYLGSFGGDTDKNCLTDFTNSLMEVEHLLNSEYPVTNRLITDYESVRILKRLLDSEMEVIHFLKPLLGNGNESDKDLVFYGEFEAEYEKLLPVIKVYNRVRNYLTRKPFSTEKIKLNFNSPTLLCGWSQSKEKEYMGVILRKDGQYYLGIMTPSNKKIFSEAPKPDEDCYEKMVLRYIPHPYQMLPKVFFSKSNIAFFNPSDEILRIKKQESFKKGKSFNRDDCHKFIDFYKDSINRHEEWRKFNFKFSDTDSYEDISRFYKEVENQAFSMSFTKIPTVYIDSLVDEGKLYLFKLHNKDFSEHSKGKPNLHTVYWNALFSEYNLQNTVYQLNGSAEIFFRKASIPENERVIHKKNVPITRKVAELNGKKEVSVFPYDIIKNRRYTVDKFQFHVPLKMNFKADEKKRINDDVIEAIRSNKGIHVIGIDRGERNLLYLSLINEEGRIIEQRSLNIIDSGEGHTQNYRDLLDSREKDREKARENWQEIQEIKDLKTGYLSQAIHTITKWMKEYNAIIVLEDLNDRFTNGRKKVEKQVYQKFEKMLIDKLNYYVDKDEEFDRMGGTHRALQLTEKFESFQKLGRQTGFIFYVPAWNTSKLDPTTGFVDLLYPKYKSVDATKDFIKKFDFIRFNSEKNYFEFGLHYSNFTERAIGCRDEWILCSYGNRIVNFRNAAKNNSWDYKEIDITKQLLDLFEKNGIDVKQENLIDSICEMKDKPFFKSLIANIKLILQIRNSASGTDIDYMISPAMNDRGEFFDTRKGLQQLPLDADANGAYNIAKKGLWIVDQIRNTTGNNVKMAMSNREWMHFAQESRLA

SEQ ID NO: 112 - protein, 1214 aa, Artificial Sequence
  Description of Artificial Sequence: Synthetic polypeptide
MKNVFGGFTNLYSLTKTLRFELKPTSKTQKLMKRNNVIQTDEEIDKLYHDEMKPILDEIHRRFINDALAQKIFISASLDNFLKVVKNYKVESAKKNIKQNQVKLLQKEITIKTLGLRREVVSGFITVSKKWKDKYVGLGIKLKGDGYKVLTEQAVLDILKIEFPNKAKYIDKFRGFWTYFSGFNENRKNYYSEEDKATSIANRIVNENLSRYIDNIIAFEEILQKIPNLKKFKQDLDITSYNYYLNQAGIDKYNKIIGGYIVDKDKKIQGINEKVNLYTQQTKKKLPKLKFLFKQIGSERKGFGIFEIKEGKEWEQLGDLFKLQRTKINSNGREKGLFDSLRTMYREFFDEIKRDSNSQARYSLDKIYFNKASVNTISNSWFTNWNKFAELLNIKEDKKNGEKKIPEQISIEDIKDSLSIIPKENLEELFKLTNREKHDRTRFFGSNAWVTFLNIWQNEIEESFNKLEEKEKDFKKNAAIKFQKNNLVQKNYIKEVCDRMLAIERMAKYHLPKDSNLSREEDFYWIIDNLSEQREIYKYYNAFRNYISKKPYNKSKMKLNFENGNLLGGWSDGQERNKAGVILRNGNKYYLGVLINRGIFRTDKINNEIYRTGSSKWERLILSNLKFQTLAGKGFLGKHGVSYGNMNPEKSVPSLQKFIRENYLKKYPQLTEVSNTKFLSKKDFDAAIKEALKECFTMNFINIAENKLLEAEDKGDLYLFEITNKDFSGKKSGKDNIHTIYWKYLFSESNCKSPIIGLNGGAEIFFREGQKDKLHTKLDKKGKKVFDAKRYSEDKLFFHVSITINYGKPKNIKFRDIINQLITSMNVNIIGIDRGEKHLLYYSVIDSNGIILKQGSLNKIRVGDKEVDFNKKLTERANEMKKARQSWEQIGNIKNFKEGYLSQAIHEIYQLMIKYNAIIVLEDLNTEFKAKRLSKVEKSVYKKFELKLARKLNHLILKDRNTNEIGGVLKAYQLTPTIGGGDVSKFEKAKQWGMMFYVRANYTSTTDPVTGWRKHLYISNFSNNSVIKSFFDPTNRDTGIEIFYSGKYRSWGFRYVQKETGKKWELFATKELERFKYNQTTKLCEKINLYDKFEELFKGIDKSADIYSQLCNVLDFRWKSLVYLWNLLNQIRNVDKNAEGNKNDFIQSPVYPFFDSRKTDGKTEPINGDANGALNIARKGLMLVERIKNNPEKYEQLIRDTEWDAWIQNFNKVN

SEQ ID NO: 113 - protein, 1206 aa, Artificial Sequence
  Description of Artificial Sequence: Synthetic polypeptide
MYYESLTKQYPVSKTIRNELIPIGKTLDNIRQNNILESDVKRKQNYEHVKGILDEYHKQLINEALDNCTLPSLKIAAEIYLKNQKEVSDREDFNKTQDLLRKEVVEKLKAHENFTKIGKKDILDLLEKLPSISEDDYNALESFRNFYTYFTSYNKVRENLYSDKEKSSTVAYRLINENFPKFLDNVKSYRFVKTAGILADGLGEEEQDSLFIVETFNKTLTQDGIDTYNSQVGKINSSINLYNQKNQKANGFRKIPKMKMLYKQILSDREESFIDEFQSDEVLIDNVESYGSVLIESLKSSKVSAFFDALRESKGKNVYVKNDLAKTAMSNIVFENWRTFDDLLNQEYDLANENKKKDDKYFEKRQKELKKNKSYSLEHLCNLSEDSCNLIENYIHQISDDIENIIINNETFLRIVINEHDRSRKLAKNRKAVKAIKDFLDSIKVLERELKLINSSGQELEKDLIVYSAHEELLVELKQVDSLYNMTRNYLTKKPFSTEKVKLNFNRSTLLNGWDRNKETDNLGVLLLKDGKYYLGIMNTSANKAFVNPPVAKTEKVFKKVDYKLLPVPNQMLPKVFFAKSNIDFYNPSSEIYSNYKKGTHKKGNMFSLEDCHNLIDFFKESISKHEDWSKFGFKFSDTASYNDISEFYREVEKQGYKLTYTDIDETYINDLIERNELYLFQIYNKDFSMYSKGKLNLHTLYFMMLFDQRNIDDVVYKLNGEAEVFYRPASISEDELIIHKAGEEIKNKNPNRARTKETSTFSYDIVKDKRYSKDKFTLHIPITMNFGVDEVKRFNDAVNSAIRIDENVNVIGIDRGERNLLYVVVIDSKGNILEQISLNSIINKEYDIETDYHALLDEREGGRDKARKDWNTVENIRDLKAGYLSQVVNVVAKLVLKYNAIICLEDLNFGFKRGRQKVEKQVYQKFEKMLIDKLNYLVIDKSREQTSPKELGGALNALQLTSKFKSFKELGKQSGVIYYVPAYLTSKIDPTTGFANLFYMKCENVEKSKRFFDGFDFIRFNALENVFEFGFDYRSFTQRACGINSKWTVCTNGERIIKYRNPDKNNMFDEKVVVVTDEMKNLFEQYKIPYEDGRNVKDMIISNEEAEFYRRLYRLLQQTLQMRNSTSDGTRDYIISPVKNKREAYFNSELSDGSVPKDADANGAYNIARKGLWVLEQIRQKSEGEKINLAMTNAEWLEYAQTHLL

SEQ ID NO: 114 - protein, 1206 aa, Butyrivibrio sp.
MYYQNLTKKYPVSKTIRNELIPIGKTLENIRKNNILESDVKRKQDYEHVKGIMDEYHKQLINEALDNYMLPSLNQAAEIYLKKHVDVEDREEFKKTQDLLRREVTGRLKEHENYTKIGKKDILDLLEKLPSISEEDYNALESFRNFYTYFTSYNKVRENLYSDEEKSSTVAYRLINENLPKFLDNIKSYAFVKAAGVLADCIEEEEQDALFMVETFNMTLTQEGIDMYNYQIGKVNSAINLYNQKNHKVEEFKKIPKMKVLYKQILSDREEVFIGEFKDDETLLSSIGAYGNVLMTYLKSEKINIFFDALRESEGKNVYVKNDLSKTTMSNIVFGSWSAFDELLNQEYDLANENKKKDDKYFEKRQKELKKNKSYTLEQMSNLSKEDISPIENYIERISEDIEKICIYNGEFEKIVVNEHDSSRKLSKNIKAVKVIKDYLDSIKELEHDIKLINGSGQELEKNLVVYVGQEEALEQLRPVDSLYNLTRNYLTKKPFSTEKVKLNFNKSTLLNGWDKNKETDNLGILFFKDGKYYLGIMNTTANKAFVNPPAAKTENVFKKVDYKLLPGSNKMLPKVFFAKSNIGYYNPSTELYSNYKKGTHKKGPSFSIDDCHNLIDFFKESIKKHEDWSKFGFEFSDTADYRDISEFYREVEKQGYKLTFTDIDESYINDLIEKNELYLFQIYNKDFSEYSKGKLNLHTLYFMMLFDQRNLDNVVYKLNGEAEVFYRPASIAENELVIHKAGEGIKNKNPNRAKVKETSTFSYDIVKDKRYSKYKFTLHIPITMNFGVDEVRRFNDVINNALRTDDNVNVIGIDRGERNLLYVVVINSEGKILEQISLNSIINKEYDIETNYHALLDEREDDRNKARKDWNTIENIKELKTGYLSQVVNVVAKLVLKYNAIICLEDLNFGFKRGRQKVEKQVYQKFEKMLIEKLNYLVIDKSREQVSPEKMGGALNALQLTSKFKSFAELGKQSGIIYYVPAYLTSKIDPTTGFVNLFYIKYENIEKAKQFFDGFDFIRFNKKDDMFEFSFDYKSFTQKACGIRSKWIVYTNGERIIKYPNPEKNNLFDEKVINVTDEIKGLFKQYRIPYENGEDIKEIIISKAEADFYKRLFRLLHQTLQMRNSTSDGTRDYIISPVKNDRGEFFCSEFSEGTMPKDADANGAYNIARKGLWVLEQIRQKDEGEKVNLSMTNAEWLKYAQLHLL

SEQ ID NO: 115 - protein, 1206 aa, Artificial Sequence
  Description of Artificial Sequence: Synthetic polypeptide
MENYYDSLTRQYPVTKTIRQELKPVGKTLENIKNAEIIEADKQKKEAYVKVKELMDEFHKSIIEKSLVGIKLDGLSEFEKLYKIKTKTDEDKNRISELFYYMRKQIADALKNSRDYGYVDNKDLIEKILPERVKDENSLNALSCFKGFTTYFTDYYKNRKNIYSDEEKHSTVGYRCINENLLIFMSNIEVYQIYKKANIKNDNYDEETLDKTFMIESFNECLTQSGVEAYNSVVASIKTATNLYIQKNNKEENFVRVPKMKVLFKQILSDRTSLFDGLIIESDDELLDKLCSFSAEVDKFLPINIDRYIKTLMDSNNGTGIYVKNDSSLTTLSNYLTDSWSSIRNAFNENYDAKYTGKVNDKYEEKREKAYKSNDSFELNYIQNLLGINVIDKYIERINFDIKEICEAYKEMTKNCFEDHDKTKKLQKNIKAVASIKSYLDSLKNIERDIKLLNGTGLESRNEFFYGEQSTVLEEITKVDELYNITRNYLTKKPFSTEKMKLNFNNPQLLGGWDVNKERDCYGVILIKDNNYYLGIMDKSANKSFLNIKESKNENAYKKVNCKLLPGPNKMFPKVFFAKSNIDYYDPTHEIKKLYDKGTFKKGNSFNLEDCHKLIDFYKESIKKNDDWKNFNFNFSDTKDYEDISGFFREVEAQNYKITYTNVSCDFIESLVDEGKLYLFQIYNKDFSEYATGNLNLHTLYLKMLFDERNLKDLCIKMNGEAEVFYRPASILDEDKVVHKANQKITNKNTNSKKKESIFSYDIVKDKRYTVDKFFIHLPITLNYKEQNVSRFNDYIREILKKSKNIRVIGIDRGERNLLYVVVCDSDGSILYQRSINEIVSGSHKTDYHKLLDNKEKERLSSRRDWKTIENIKDLKAGYMSQVVNEIYNLILKYNAIVVLEDLNIGFKNGRKKVEKQVYQNFEKALIDKLNYLCIDKTREQLSPSSPGGVLNAYQLTAKFESFEKIGKQTGCIFYVPAYLTSQIDPTTGFVNLFYQKDTSKQGLQLFFRKFKKINFDKVASNFEFVFDYNDFTNKAEGTKTNWTISTQGTRIAKYRSDDANGKWISRTVHPTDIIKEALNREKINYNDGHDLIDEIVSIEKSAVLKEIYYGFKLTLQLRNSTLANEEEQEDYIISPVKNSSGNYFDSRITSKELPCDADANGAYNIARKGLWALEQIRNSENVSKVKLAISNKEWFEYTQNNIPSL

SEQ ID NO: 116 - protein, 1205 aa, Oribacterium sp.
MYYDGLTKQYALSKTIRNELVPIGKTLDNIKKNRILEADIKRKSDYEHVKKLMDMYHKKIINEALDNFKLSVLEDAADIYFNKQNDERDIDAFLKIQDKLRKEIVEQLKGHTDYSKVGNKDFLGLLKAASTEEDRILIESFDNFYTYFTSYNKVRSNLYSAEDKSSTVAYRLINENLPKFFDNIKAYRTVRNAGVISGDMSIVEQDELFEVDTFNHTLTQYGIDTYNHMIGQLNSAINLYNQKMHGAGSFKKLPKMKELYKQLLTEREEEFIEEYTDDEVLITSVHNYVSYLIDYLNSDKVESFFDTLRKSDGKEVFIKNDVSKTTMSNILFDNWSTIDDLINHEYDSAPENVKKTKDDKYFEKRQKDLKKNKSYSLSKIAALCRDTTILEKYIRRLVDDIEKIYTSNNVFSDIVLSKHDRSKKLSKNTNAVQAIKNMLDSIKDFEHDVMLINGSGQEIKKNLNVYSEQEALAGILRQVDHIYNLTRNYLTKKPFSTEKIKLNFNRPTFLDGWDKNKEEANLGILLIKDNRYYLGIMNTSSNKAFVNPPKAISNDIYKKVDYKLLPGPNKMLPKVFFATKNIAYYAPSEELLSKYRKGTHKKGDSFSIDDCRNLIDFFKSSINKNTDWSTFGFNFSDTNSYNDISDFYREVEKQGYKLSFTDIDACYIKDLVDNNELYLFQIYNKDFSPYSKGKLNLHTLYFKMLFDQRNLDNVVYKLNGEAEVFYRPASIESDEQIIHKSGQNIKNKNQKRSNCKKTSTFDYDIVKDRRYCKDKFMLHLPITVNFGTNESGKFNELVNNAIRADKDVNVIGIDRGERNLLYVVVVDPCGKIIEQISLNTIVDKEYDIETDYHQLLDEKEGSRDKARKDWNTIENIKELKEGYLSQVVNIIAKLVLKYDAIICLEDLNFGFKRGRQKVEKQVYQKFEKMLIDKMNYLVLDKSRKQESPQKPGGALNALQLTSAFKSFKELGKQTGIIYYVPAYLTSKIDPTTGFANLFYIKYESVDKARDFFSKFDFIRYNQMDNYFEFGFDYKSFTERASGCKSKWIACTNGERIVKYRNSDKNNSFDDKTVILTDEYRSLFDKYLQNYIDEDDLKDQILQIDSADFYKNLIKLFQLTLQMRNSSSDGKRDYIISPVKNYREEFFCSEFSDDTFPRDADANGAYNIARKGLWVIKQIRETKSGTKINLAMSNSEWLEYAQCNLL

SEQ ID NO: 117 - protein, 1205 aa, Pseudobutyrivibrio ruminis
MYYQNLTKMYPISKTLRNELIPVGKTLENIRKNGILEADIQRKADYEHVKKLMDNYHKQLINEALQGVHLSDLSDAYDLYFNLSKEKNSVDAFSKCQDKLRKEIVSLLKNHENFPKIGNKEIIKLLQSLYDNDTDYKALDSFSNFYTYFSSYNEVRKNLYSDEEKSSTVAYRLINENLPKFLDNIKAYAIAKKAGVRAEGLSEEDQDCLFIIETFERTLTQDGIDNYNAAIGKLNTAINLFNQQNKKQEGFRKVPQMKCLYKQILSDREEAFIDEFSDDEDLITNIESFAENMNVFLNSEIITDFKIALVESDGSLVYIKNDVSKTSFSNIVFGSWNAIDEKLSDEYDLANSKKKKDEKYYEKRQKELKKNKSYDLETIIGLFDDNSDVIGKYIEKLESDITAIAEAKNDFDEIVLRKHDKNKSLRKNTNAVEAIKSYLDTVKDFERDIKLINGSGQEVEKNLVVYAEQENILAEIKNVDSLYNMSRNYLTQKPFSTEKFKLNFNRATLLNGWDKNKETDNLGILFEKDGMYYLGIMNTKANKIFVNIPKATSNDVYHKVNYKLLPGPNKMLPKVFFAQSNLDYYKPSEELLAKYKAGTHKKGDNFSLEDCHALIDFFKASIEKHPDWSSFGFEFSETCTYEDLSGFYREVEKQGYKITYTDVDADYITSLVERDELYLFQIYNKDFSPYSKGNLNLHTIYLQMLFDQRNLNNVVYKLNGEAEVFYRPASINDEEVIIHKAGEEIKNKNSKRAVDKPTSKFGYDIIKDRRYSKDKFMLHIPVTMNFGVDETRRFNDVVNDALRNDEKVRVIGIDRGERNLLYVVVVDTDGTILEQISLNSIINNEYSIETDYHKLLDEKEGDRDRARKNWTTIENIKELKEGYLSQVVNVIAKLVLKYNAIICLEDLNFGFKRGRQKVEKQVYQKFEKMLIDKLNYLVIDKSRKQDKPEEFGGALNALQLTSKFTSFKDMGKQTGIIYYVPAYLTSKIDPTTGFANLFYVKYENVEKAKEFFSRFDSISYNNESGYFEFAFDYKKFTDRACGARSQWTVCTYGERIIKFRNTEKNNSFDDKTIVLSEEFKELFSIYGISYEDGAELKNKIMSVDEADFFRSLTRLFQQTMQMRNSSNDVTRDYIISPIMNDRGEFFNSEACDASKPKDADANGAFNIARKGLWVLEQIRNTPSGDKLNLAMSNAEWLEYAQRNQI

SEQ ID NO: 118 - protein, 1154 aa, Proteocatella sphenisci
MENFKNLYPINKTLRFELRPYGKTLENFKKSGLLEKDAFKANSRRSMQAIIDEKFKETIEERLKYTEFSECDLGNMTSKDKKITDKAATNLKKQVILSFDDEIFNNYLKPDKNIDALFKNDPSNPVISTFKGFTTYFVNFFEIRKHIFKGESSGSMAYRIIDENLTTYLNNIEKIKKLPEELKSQLEGIDQIDKLNNYNEFITQSGITHYNEIIGGISKSENVKIQGINEGINLYCQKNKVKLPRLTPLYKMILSDRVSNSFVLDTIENDTELIEMISDLINKTEISQDVIMSDIQNIFIKYKQLGNLPGISYSSIVNAICSDYDNNFGDGKRKKSYENDRKKHLETNVYSINYISELLTDTDVSSNIKMRYKELEQNYQVCKENFNATNWMNIKNIKQSEKTNLIKDLLDILKSIQRFYDLFDIVDEDKNPSAEFYTWLSKNAEKLDFEFNSVYNKSRNYLTRKQYSDKKIKLNFDSPTLAKGWDANKEIDNSTIIMRKFNNDRGDYDYFLGIWNKSTPANEKIIPLEDNGLFEKMQYKLYPDPSKMLPKQFLSKIWKAKHPTTPEFDKKYKEGRHKKGPDFEKEFLHELIDCFKHGLVNHDEKYQDVFGFNLRNTEDYNSYTEFLEDVERCNYNLSFNKIADTSNLINDGKLYVFQIWSKDFSIDSKGTKNLNTIYFESLFSEENMIEKMFKLSGEAEIFYRPASLNYCEDIIKKGHHHAELKDKFDYPIIKDKRYSQDKFFFHVPMVINYKSEKLNSKSLNNRTNENLGQFTHIIGIDRGERHLIYLTVVDVSTGEIVEQKHLDEIINTDTKGVEHKTHYLNKLEEKSKTRDNERKSWEAIETIKELKEGYISHVINEIQKLQEKYNALIVMENLNYGFKNSRIKVEKQVYQKFETALIKKFNYIIDKKDPETYIHGYQLTNPITTLDKIGNQSGIVLYIPAWNTSKIDPVTGFVNLLYADDLKYKNQEQAKSFIQKIDNIYFENGEFKFDIDFSKWNNRYSISKTKWTLTSYGTRIQTFRNPQKNNKWDSAEYDLTEEFKLILNIDGTLKSQDVETYKKFMSLFKLMLQLRNSVTGTDIDYMISPVTDKTGTHFDSRENIKNLPADADANGAYNIARKGIMAIENIMNGISDPLKISNEDYLKYIQNQQE

SEQ ID NO: 119 - DNA, 34 bp, Artificial Sequence
  Description of Artificial Sequence: Synthetic oligonucleotide
ttagagaagtcatttaataaggccactgttaaaa

SEQ ID NO: 120 - DNA, 34 bp, Artificial Sequence
  Description of Artificial Sequence: Synthetic oligonucleotide
  Description of Combined DNA/RNA Molecule: Synthetic oligonucleotide
ttcgagaagucauuuaauaaggccacuguuaaaa

SEQ ID NO: 121 - DNA, 34 bp, Artificial Sequence; identical to SEQ ID NO: 120
  Description of Artificial Sequence: Synthetic oligonucleotide
  Description of Combined DNA/RNA Molecule: Synthetic oligonucleotide

SEQ ID NO: 122 - DNA, 34 bp, Artificial Sequence; identical to SEQ ID NO: 120
  Description of Artificial Sequence: Synthetic oligonucleotide
  Description of Combined DNA/RNA Molecule: Synthetic oligonucleotide

SEQ ID NO: 123 - DNA, 34 bp, Artificial Sequence; identical to SEQ ID NO: 120
  Description of Artificial Sequence: Synthetic oligonucleotide
  Description of Combined DNA/RNA Molecule: Synthetic oligonucleotide

SEQ ID NO: 124 - DNA, 24 bp, Artificial Sequence
  Description of Artificial Sequence: Synthetic oligonucleotide
ctgatggtccatgtctgttactcg

SEQ ID NO: 125 - DNA, 20 bp, Artificial Sequence
  Description of Artificial Sequence: Synthetic oligonucleotide
ctgggactcaggcgggtcac

SEQ ID NO: 126 - DNA, 25 bp, Artificial Sequence
  Description of Artificial Sequence: Synthetic oligonucleotide
cctcacacaacagcttcatgtcagc

SEQ ID NO: 127 - DNA, 3960 bp, Artificial Sequence
  Description of Artificial Sequence: Synthetic polynucleotide
atggccccaaagaagaagcggaaggtcggtatccacggagtcccagcagccggtagtaacatcaaaaactttaccgggctctaccccctcagcaaaactttgcgctttgaactcaagcctattggcaaaaccaaggaaaacatcgagaaaaatggcatcctgaccaaggacgagcaacgggctaaagactacctcatagtcaaaggctttattgacgagtatcacaagcagttcatcaaagacaggctttgggactttaaattgcctctcgaaagtgagggggagaagaacagtctcgaagaataccaggaactgtacgagctcactaagcgcaacgatgcccaggaggccgacttcaccgagattaaagataaccttcgcagctctattaccgaacagctcacgaagtctggatctgcgtacgatcggatttttaaaaaagagttcattagagaagacctggtcaacttcctcgaagatgaaaaagataaaaatatcgtgaaacagttcgaggactttactacatattttacgggtttttatgaaaataggaagaacatgtactctagcgaagagaagtccacggccatcgcataccggcttatccatcagaatctgccaaaattcatggacaacatgagaagttttgccaaaattgcaaattccagtgtttccgagcactttagcgacatctatgaaagctggaaggaatatctgaatgtaaatagcatcgaggaaatcttccagctcgactattttagcgaaaccttgactcagccacatattgaggtgtataactatattatcgggaagaaagtcctggaagacggaaccgagataaagggcatcaacgagtatgtgaacctctacaatcagcagcagaaagataagagtaaacgactgcctttcctggtgccactgtataagcaaattttgtctgatagggaaaaactctcctggattgctgaagagttcgacagcgacaagaagatgctgagcgctatcaccgagtcttacaaccacctgcacaacgtgttgatgggtaacgagaacgaaagcctgcgaaatctgctgctgaatattaaggactataacctggagaaaattaatatcacaaacgacttgtctctcaccgaaatctcccagaatctttttggccgatatgatgtattcacaaatgggatcaaaaacaagctgagagtgttgactccaaggaagaaaaaggagacggacgaaaattttgaggaccgcattaacaaaatttttaagacccagaagtccttcagcatcgcttttctgaacaagctgcctcagcccgaaatggaggatgggaagccccggaacattgaggactatttcattacacagggggcgattaacaccaaatctatacagaaagaagatatcttcgcccaaattgagaatgcatacgaggatgcacaggtgttcctgcaaattaaggacaccgacaacaaacttagccagaacaagacggcggtggaaaagatcaaaactttgctggacgccttgaaggaactccagcacttcatcaaaccgctgctgggctctggggaggagaacgagaaagacgaactgttctacggttccttcctggccatctgggacgaactggacaccattacaccactttataacaaagtgagaaattggctgacccgaaaaccatattcaacagaaaaaatcaaattgaatttcgacaacgctcagctgctgggagggtgggatgtcaataaagaacacgactgtgcaggtatcttgttgcggaaaaacgatagctactatctcggaattatcaataagaaaaccaaccacatctttgatacggatattacgccatcagatggcgagtgctatgacaaaatcgactacaagctccttcccggggcgaacaaaatgcttccaaaggtgttttttagtaagtcccgaatcaaagagttcgagccatcagaggccataatcaattgctataagaaggggacacacaaaaaaggaaaaaactttaacctgacggactgtcaccgcctgatcaacttttttaagacctcaatcgagaaacacgaggattggtcaaaattcggattcaagttctccgataccgaaacgtatgaggatattagcggtttttatagagaggtcgagcagcagggatacaggctgacgagccatccagtcagtgccagctatatacatagtctggtcaaggaaggaaaactgtacctcttccaaatctggaacaaggacttttctcaattctccaaggggacccctaacttgcacactctctattggaagatgctgtttgacaaacggaatcttagcgatgtggtttataagctgaatggccaggctgaagtgttctatagaaagagctccattgaacaccagaaccgaattatccaccccgctcagcatcccatcacaaataagaatgagcttaacaaaaagcacactagcaccttcaaatacgatatcatcaaagatcgcagatacacggtggataaattccagttccatgtgcccattactataaattttaaggcgaccgggcagaacaacatcaacccaatcgtccaagaggtgattcgccaaaacggtatcacccacatcataggcatcgatcgaggtgaacgccatcttctgtacctctctctcatcgatttgaaaggcaacatcatcaagcagatgactctcaacgaaattattaatgagtataagggtgtgacctataagaccaactaccataacctcctggagaagagggagaaggagcggaccgaggccagacactcctggagtagtattgaaagcataaaagaactgaaggatggatacatgtcacaggtgattcacaaaattacggacatgatggttaagtacaatgcgattgtggtcctggaggacctcaacggggggtttatgcgaggccgccagaaggtcgagaagcaggtgtaccagaaatttgaaaaaaagttgatcgacaagctgaactatctcgttgacaagaaactcgacgctaacgaggtcggcggagtactgaatgcttatcagctgaccaacaagttcgagtctttcaagaagattgggaaacaaagcggatttttgttctacatccccgcctggaacacaagcaaaatcgatcctataacagggttcgttaatctgttcaacaccaggtacgagtctatcaaggagacaaaagttttttggtctaagtttgatattatccgatacaataaagagaagaattggttcgagttcgtcttcgattacaatacctttacgactaaagcggagggaacacgcactaagtggactctgtgcacccacggcactcgcatccagacattccggaacccagaaaagaatgcccagtgggacaataaagagatcaatttgactgagtccttcaaagctctgtttgaaaagtacaagatcgatatcaccagtaatctcaaggaatccatcatgcaggaaaccgagaagaagttcttccaggaactgcataatctgctccacctgaccctgcagatgaggaatagcgttactggaaccgacatagactatttgatcagccccgttgccgatgaggatggaaatttctatgatagtcgcataaatggcaaaaattttccggagaatgccgatgccaatggcgcgtacaacatcgcacgaaagggtctgatgcttattcggcagatcaagcaagcagatccacagaagaaattcaagtttgagacaatcaccaataaagactggctgaaattcgcccaagacaagccctatcttaaagatggcagcgggaaaaggccggcggccacgaaaaaggccggccaggcaaaaaagaaaaagggatcctacccatacgatgttccagattacgcttatccctacgacgtgcctgattatgcatacccatacgatgtccccgactatgcctaa

SEQ ID NO: 128 - DNA, 23 bp, Artificial Sequence
  Description of Artificial Sequence: Synthetic oligonucleotide
cctcactcctgctcggtgaattt

SEQ ID NO: 129 - DNA, 23 bp, Artificial Sequence
  Description of Artificial Sequence: Synthetic oligonucleotide
ctgatggtccatgtctgttactc

SEQ ID NO: 130 - protein, 6 aa, Artificial Sequence
  Description of Artificial Sequence: Synthetic 6xHis tag
HHHHHH

SEQ ID NO: 131 - DNA, 31 bp, Francisella novicida
gagaagtcatttaataaggccactgttaaaa

SEQ ID NO: 132 - DNA, 30 bp, Francisella novicida
gctactattcctgtgccttcagataattca

SEQ ID NO: 133 - DNA, 27 bp, Francisella novicida
gtctagagccttttgtattagtagccg

SEQ ID NO: 134 - DNA, 98 bp, Artificial Sequence
  Description of Artificial Sequence: Synthetic oligonucleotide
  modified_base (30)..(37): a, c, t, g, unknown or other
ggccagtgaattcgagctcggtacccgggnnnnnnnngagaagtcatttaataaggccactgttaaaaagcttggcgtaatcatggtcatagctgttt

SEQ ID NO: 135 - DNA, 98 bp, Artificial Sequence
  Description of Artificial Sequence: Synthetic oligonucleotide
  modified_base (61)..(68): a, c, t, g, unknown or other
ggccagtgaattcgagctcggtacccggggagaagtcatttaataaggccactgttaaaannnnnnnnagcttggcgtaatcatggtcatagctgttt

SEQ ID NO: 136 - DNA, 25 bp, Artificial Sequence
  Description of Artificial Sequence: Synthetic oligonucleotide
gctgacatgaagctgttgtgtgagg

SEQ ID NO: 137 - DNA, 21 bp, Artificial Sequence
  Description of Artificial Sequence: Synthetic oligonucleotide
ggccagtgaattcgagctcgg

SEQ ID NO: 138 - DNA, 28 bp, Artificial Sequence
  Description of Artificial Sequence: Synthetic oligonucleotide
caatttcacacaggaaacagctatgacc

SEQ ID NO: 139 - DNA, 21 bp, Artificial Sequence
  Description of Artificial Sequence: Synthetic oligonucleotide
cggggctggcttaactatgcg

SEQ ID NO: 140 - DNA, 20 bp, Artificial Sequence
  Description of Artificial Sequence: Synthetic oligonucleotide
gcccaatacgcaaaccgcct

SEQ ID NO: 141 - DNA, 20 bp, Artificial Sequence
  Description of Artificial Sequence: Synthetic oligonucleotide
ccatccccttctgtgaatgt

SEQ ID NO: 142 - DNA, 20 bp, Artificial Sequence
  Description of Artificial Sequence: Synthetic oligonucleotide
tctccgtgtctccaatctcc

SEQ ID NO: 143 - DNA, 20 bp, Artificial Sequence
  Description of Artificial Sequence: Synthetic oligonucleotide
ctgggactcaggcgggtcac

SEQ ID NO: 144 - DNA, 25 bp, Artificial Sequence
  Description of Artificial Sequence: Synthetic oligonucleotide
gctgacatgaagctgttgtgtgagg

SEQ ID NO: 145 - DNA, 24 bp, Artificial Sequence
  Description of Artificial Sequence: Synthetic oligonucleotide
gagaagtcatttaataaggccact

SEQ ID NO: 146 - DNA, 22 bp, Artificial Sequence
  Description of Artificial Sequence: Synthetic oligonucleotide
gagaagtcatttaataaggcca

SEQ ID NO: 147 - DNA, 20 bp, Artificial Sequence
  Description of Artificial Sequence: Synthetic oligonucleotide
gagaagtcatttaataaggc

SEQ ID NO: 148 - DNA, 18 bp, Artificial Sequence
  Description of Artificial Sequence: Synthetic oligonucleotide
gagaagtcatttaataag

SEQ ID NO: 149 - DNA, 17 bp, Artificial Sequence
  Description of Artificial Sequence: Synthetic oligonucleotide
gagaagtcatttaataa

SEQ ID NO: 150 - DNA, 16 bp, Artificial Sequence
  Description of Artificial Sequence: Synthetic oligonucleotide
gagaagtcatttaata

SEQ ID NO: 151 - DNA, 24 bp, Artificial Sequence
  Description of Artificial Sequence: Synthetic oligonucleotide
gataagtcatttaataaggccact

SEQ ID NO: 152 - DNA, 24 bp, Artificial Sequence
  Description of Artificial Sequence: Synthetic oligonucleotide
gagaaggcatttaataaggccact

SEQ ID NO: 153 - DNA, 24 bp, Artificial Sequence
  Description of Artificial Sequence: Synthetic oligonucleotide
gagaagtcatgtaataaggccact

SEQ ID NO: 154 - DNA, 24 bp, Artificial Sequence
  Description of Artificial Sequence: Synthetic oligonucleotide
gagaagtcatttaagaaggccact

SEQ ID NO: 155 - DNA, 24 bp, Artificial Sequence
  Description of Artificial Sequence: Synthetic oligonucleotide
gagaagtcatttaataagtccact

SEQ ID NO: 156 - DNA, 24 bp, Artificial Sequence
  Description of Artificial Sequence: Synthetic oligonucleotide
gagaagtcatttaataaggccaat

SEQ ID NO: 157 - DNA, 42 bp, Artificial Sequence
  Description of Artificial Sequence: Synthetic oligonucleotide
atttctactgttgtagatgagaagtcatttaataaggccact

SEQ ID NO: 158 - DNA, 41 bp, Artificial Sequence
  Description of Artificial Sequence: Synthetic oligonucleotide
tttctactgttgtagatgagaagtcatttaataaggccact

SEQ ID NO: 159 - DNA, 40 bp, Artificial Sequence
  Description of Artificial Sequence: Synthetic oligonucleotide
ttctactgttgtagatgagaagtcatttaataaggccact

SEQ ID NO: 160 - DNA, 39 bp, Artificial Sequence
  Description of Artificial Sequence: Synthetic oligonucleotide
tctactgttgtagatgagaagtcatttaataaggccact

SEQ ID NO: 161 - DNA, 35 bp, Artificial Sequence
  Description of Artificial Sequence: Synthetic oligonucleotide
ctgttgtagatgagaagtcatttaataaggccact

SEQ ID NO: 162 - DNA, 31 bp, Artificial Sequence
  Description of Artificial Sequence: Synthetic oligonucleotide
tgtagatgagaagtcatttaataaggccact

SEQ ID NO: 163 - DNA, 19 bp, Artificial Sequence
  Description of Artificial Sequence: Synthetic oligonucleotide
aatttctgctgttgcagat

SEQ ID NO: 164 - DNA, 19 bp, Artificial Sequence
  Description of Artificial Sequence: Synthetic oligonucleotide
aatttccactgttgtggat

SEQ ID NO: 165 - DNA, 19 bp, Artificial Sequence
  Description of Artificial Sequence: Synthetic oligonucleotide
aattcctactgttgtaggt

SEQ ID NO: 166 - DNA, 19 bp, Artificial Sequence
  Description of Artificial Sequence: Synthetic oligonucleotide
aatttatactgttgtagat

SEQ ID NO: 167 - DNA, 19 bp, Artificial Sequence
  Description of Artificial Sequence: Synthetic oligonucleotide
aatttcgactgttgtagat

SEQ ID NO: 168 - DNA, 19 bp, Artificial Sequence
  Description of Artificial Sequence: Synthetic oligonucleotide
aatttctagtgttgtagat

SEQ ID NO: 169 - DNA, 19 bp, Artificial Sequence
  Description of Artificial Sequence: Synthetic oligonucleotide
aatttctactattgtagat

SEQ ID NO: 170 - DNA, 19 bp, Artificial Sequence
  Description of Artificial Sequence: Synthetic oligonucleotide
aatttctactgctgtagat

SEQ ID NO: 171 - DNA, 18 bp, Artificial Sequence
  Description of Artificial Sequence: Synthetic oligonucleotide
aatttctactttgtagat

SEQ ID NO: 172 - DNA, 17 bp, Artificial Sequence
  Description of Artificial Sequence: Synthetic oligonucleotide
aatttctacttgtagat

SEQ ID NO: 173 - DNA, 19 bp, Artificial Sequence
  Description of Artificial Sequence: Synthetic oligonucleotide
aatttctacttttgtagaa

SEQ ID NO: 174 - DNA, 19 bp, Artificial Sequence
  Description of Artificial Sequence: Synthetic oligonucleotide
aatttctacttttgtagac

SEQ ID NO: 175 - DNA, 20 bp, Artificial Sequence
  Description of Artificial Sequence: Synthetic oligonucleotide
taatttctactgttgtagat

SEQ ID NO: 176 - DNA, 23 bp, Artificial Sequence
  Description of Artificial Sequence: Synthetic oligonucleotide
cctcactcctgctcggtgaattt

SEQ ID NO: 177 - DNA, 20 bp, Artificial Sequence
  Description of Artificial Sequence: Synthetic oligonucleotide
taatttctactgttgtagat

SEQ ID NO: 178 - DNA, 23 bp, Artificial Sequence
  Description of Artificial Sequence: Synthetic oligonucleotide
aggagtgttcagtctccgtgaac

SEQ ID NO: 179 - DNA, 20 bp, Artificial Sequence
  Description of Artificial Sequence: Synthetic oligonucleotide
taatttctactgttgtagat

SEQ ID NO: 180 - DNA, 23 bp, Artificial Sequence
  Description of Artificial Sequence: Synthetic oligonucleotide
ctgatggtccatgtctgttactc

SEQ ID NO: 181 - DNA, 20 bp, Artificial Sequence
  Description of Artificial Sequence: Synthetic oligonucleotide
taatttctactgttgtagat

SEQ ID NO: 182 - DNA, 23 bp, Artificial Sequence
  Description of Artificial Sequence: Synthetic oligonucleotide
tttcccttcagctaaaataaagg

SEQ ID NO: 183 - DNA, 21 bp, Artificial Sequence
  Description of Artificial Sequence: Synthetic oligonucleotide
taatttctactaagtgtagat

SEQ ID NO: 184 - DNA, 23 bp, Artificial Sequence
  Description of Artificial Sequence: Synthetic oligonucleotide
cctcactcctgctcggtgaattt

SEQ ID NO: 185 - DNA, 21 bp, Artificial Sequence
  Description of Artificial Sequence: Synthetic oligonucleotide
taatttctactaagtgtagat

SEQ ID NO: 186 - DNA, 23 bp, Artificial Sequence
  Description of Artificial Sequence: Synthetic oligonucleotide
aggagtgttcagtctccgtgaac

SEQ ID NO: 187 - DNA, 21 bp, Artificial Sequence
  Description of Artificial Sequence: Synthetic oligonucleotide
taatttctactaagtgtagat

SEQ ID NO: 188 - DNA, 23 bp, Artificial Sequence
  Description of Artificial Sequence: Synthetic oligonucleotide
ctgatggtccatgtctgttactc

SEQ ID NO: 189 - DNA, 21 bp, Artificial Sequence
  Description of Artificial Sequence: Synthetic oligonucleotide
taatttctactaagtgtagat

SEQ ID NO: 190 - DNA, 23 bp, Artificial Sequence
  Description of Artificial Sequence: Synthetic oligonucleotide
tttcccttcagctaaaataaagg

SEQ ID NO: 191 - DNA, 20 bp, Artificial Sequence
  Description of Artificial Sequence: Synthetic oligonucleotide
tcactcctgctcggtgaatt

SEQ ID NO: 192 - DNA, 20 bp, Artificial Sequence
  Description of Artificial Sequence: Synthetic oligonucleotide
aaccctctggggaccgtttg

SEQ ID NO: 193 - DNA, 20 bp, Artificial Sequence
  Description of Artificial Sequence: Synthetic oligonucleotide
agtacgttaatgtttcctga

SEQ ID NO: 194 - DNA, 20 bp, Artificial Sequence
  Description of Artificial Sequence: Synthetic oligonucleotide
tttcccttcagctaaaataa

SEQ ID NO: 195 - DNA, 20 bp, Artificial Sequence
  Description of Artificial Sequence: Synthetic oligonucleotide
taatttctactgttgtagat

SEQ ID NO: 196 - DNA, 21 bp, Artificial Sequence
  Description of Artificial Sequence: Synthetic oligonucleotide
agaaatgcatggttctcatgc

SEQ ID NO: 197 - DNA, 21 bp, Artificial Sequence
  Description of Artificial Sequence: Synthetic oligonucleotide
aaaattacctagtaattaggt

SEQ ID NO: 198 - DNA, 20 bp, Artificial Sequence
  Description of Artificial Sequence: Synthetic oligonucleotide
ggatttctacttttgtagat

SEQ ID NO: 199 - DNA, 20 bp, Artificial Sequence
  Description of Artificial Sequence: Synthetic oligonucleotide
aaatttctacttttgtagat

SEQ ID NO: 200 - DNA, 21 bp, Artificial Sequence
  Description of Artificial Sequence: Synthetic oligonucleotide
cgcgcccacgcggggcgcgac

SEQ ID NO: 201 - DNA, 20 bp, Artificial Sequence
  Description of Artificial Sequence: Synthetic oligonucleotide
taatttctactcttgtagat

SEQ ID NO: 202 - DNA, 20 bp, Artificial Sequence
  Description of Artificial Sequence: Synthetic oligonucleotide
gaatttctactattgtagat

SEQ ID NO: 203 - DNA, 21 bp, Artificial Sequence
  Description of Artificial Sequence: Synthetic oligonucleotide
gaatctctactctttgtagat

SEQ ID NO: 204 - DNA, 19 bp, Artificial Sequence
  Description of Artificial Sequence: Synthetic oligonucleotide
taatttctactttgtagat

SEQ ID NO: 205 - DNA, 21 bp, Artificial Sequence
  Description of Artificial Sequence: Synthetic oligonucleotide
aaatttctactgtttgtagat

SEQ ID NO: 206 - DNA, 20 bp, Artificial Sequence
  Description of Artificial Sequence: Synthetic oligonucleotide
gaatttctacttttgtagat

SEQ ID NO: 207 - DNA, 21 bp, Artificial Sequence
  Description of Artificial Sequence: Synthetic oligonucleotide
taatttctactaagtgtagat

SEQ ID NO: 208 - DNA, 20 bp, Artificial Sequence
  Description of Artificial Sequence: Synthetic oligonucleotide
taatttctactattgtagat

SEQ ID NO: 209 - DNA, 20 bp, Artificial Sequence
  Description of Artificial Sequence: Synthetic oligonucleotide
taatttctacttcggtagat

SEQ ID NO: 210 - DNA, 20 bp, Artificial Sequence
  Description of Artificial Sequence: Synthetic oligonucleotide
taatttctactattgtagat

SEQ ID NO: 211 - DNA, 6569 bp, Artificial Sequence
  Description of Artificial Sequence: Synthetic polynucleotide
catcaaggaattggttctaagcttatagaagcaatgattaaggaagccaaaaaaaataatattgatgcaatatttgtcttaggtcatccaagttattatccaaaatttggttttaaaccagccacagaatatcagataaaatgtgaatatgatgtcccagcggatgtttttatggtactagatttgtcagctaaactagctagtttaaaaggacaaactgtctactatgccgatgagtttggcaaaattttttagatctacaaaattataaactaaataaagattcttataataactttatatataatcgaaatgtagagaattttataaggagtctttatcatgtcaatttatcaagaatttgttaataaatatagtttaagtaaaactctaagatttgagttaatcccacagggtaaaacacttgaaaacataaaagcaagaggtttgattttagatgatgagaaaagagctaaagactacaaaaaggctaaacaaataattgataaatatcatcagttttttatagaggagatattaagttcggtttgtattagcgaagatttattacaaaactattctgatgtttattttaaacttaaaaagagtgatgatgataatctacaaaaagattttaaaagtgcaaaagatacgataaagaaacaaatatctgaatatataaaggactcagagaaatttaagaatttgtttaatcaaaaccttatcgatgctaaaaaagggcaagagtcagatttaattctatggctaaagcaatctaaggataatggtatagaactatttaaagccaatagtgatatcacagatatagatgaggcgttagaaataatcaaatcttttaaaggttggacaacttattttaagggttttcatgaaaatagaaaaaatgtttatagtagcaatgatattcctacatctattatttataggatagtagatgataatttgcctaaatttctagaaaataaagctaagtatgagagtttaaaagacaaagctccagaagctataaactatgaacaaattaaaaaagatttggcagaagagctaacctttgatattgactacaaaacatctgaagttaatcaaagagttttttcacttgatgaagtttttgagatagcaaactttaataattatctaaatcaaagtggtattactaaatttaatactattattggtggtaaatttgtaaatggtgaaaatacaaagagaaaaggtataaatgaatatataaatctatactcacagcaaataaatgataaaacactcaaaaaatataaaatgagtgttttatttaagcaaattttaagtgatacagaatctaaatcttttgtaattgataagttagaagatgatagtgatgtagttacaacgatgcaaagtttttatgagcaaatagcagcttttaaaacagtagaagaaaaatctattaaagaaacactatctttattatttgatgatttaaaagctcaaaaacttgatttgagtaaaatttattttaaaaatgataaatctcttactgatctatcacaacaagtttttgatgattatagtgttattggtacagcggtactagaatatataactcaacaaatagcacctaaaaatcttgataaccctagtaagaaagagcaagaattaatagccaaaaaaactgaaaaagcaaaatacttatctctagaaactataaagcttgccttagaagaatttaataagcatagagatatagataaacagtgtaggtttgaagaaatacttgcaaactttgcggctattccgatgatatttgatgaaatagctcaaaacaaagacaatttggcacagatatctatcaaatatcaaaatcaaggtaaaaaagacctacttcaagctagtgcggaagatgatgttaaagctatcaaggatcttttagatcaaactaataatctcttacataaactaaaaatatttcatattagtcagtcagaagataaggcaaatattttagacaaggatgagcatttttatctagtatttgaggagtgctactttgagctagcgaatatagtgcctctttataacaaaattagaaactatataactcaaaagccatatagtgatgagaaatttaagctcaattttgagaactcgactttggctaatggttgggataaaaataaagagcctgacaatacggcaattttatttatcaaagatgataaatattatctgggtgtgatgaataagaaaaataacaaaatatttgatgataaagctatcaaagaaaataaaggcgagggttataaaaaaattgtttataaacttttacctggcgcaaataaaatgttacctaaggttttcttttctgctaaatctataaaattttataatcctagtgaagatatacttagaataagaaatcattccacacatacaaaaaatggtagtcctcaaaaaggatatgaaaaatttgagtttaatattgaagattgccgaaaatttatagatttttataaacagtctataagtaagcatccggagtggaaagattttggatttagattttctgatactcaaagatataattctatagatgaattttatagagaagttgaaaatcaaggctacaaactaacttttgaaaatatatcagagagctatattgatagcgtagttaatcagggtaaattgtacctattccaaatctataataaagatttttcagcttatagcaaagggcgaccaaatctacatactttatattggaaagcgctgtttgatgagagaaatcttcaagatgtggtttataagctaaatggtgaggcagagcttttttatcgtaaacaatcaatacctaaaaaaatcactcacccagctaaagaggcaatagctaataaaaacaaagataatcctaaaaaagagagtgtttttgaatatgatttaatcaaagataaacgctttactgaagataagtttttctttcactgtcctattacaatcaattttaaatctagtggagctaataagtttaatgatgaaatcaatttattgctaaaagaaaaagcaaatgatgttcatatattaagtatagatagaggtgaaagacatttagcttactatactttggtagatggtaaaggcaatatcatcaaacaagatactttcaacatcattggtaatgatagaatgaaaacaaactaccatgataagcttgctgcaatagagaaagatagggattcagctaggaaagactggaaaaagataaataacatcaaagagatgaaagagggctatctatctcaggtagttcatgaaatagctaagctagttatagagtataatgctattgtggtttttgaggatttaaattttggatttaaaagagggcgtttcaaggtagagaagcaggtctatcaaaagttagaaaaaatgctaattgagaaactaaactatctagttttcaaagataatgagtttgataaaactgggggagtgcttagagcttatcagctaacagcaccttttgagacttttaaaaagatgggtaaacaaacaggtattatctactatgtaccagctggttttacttcaaaaatttgtcctgtaactggttttgtaaatcagttatatcctaagtatgaaagtgtcagcaaatctcaagagttctttagtaagtttgacaagatttgttataaccttgataagggctattttgagtttagttttgattataaaaactttggtgacaaggctgccaaaggcaagtggactatagctagctttgggagtagattgattaactttagaaattcagataaaaatcataattgggatactcgagaagtttatccaactaaagagttggagaaattgctaaaagattattctatcgaatatgggcatggcgaatgtatcaaagcagctatttgcggtgagagcgacaaaaagttttttgctaagctaactagtgtcctaaatactatcttacaaatgcgtaactcaaaaacaggtactgagttagattatctaatttcaccagtagcagatgtaaatggcaatttctttgattcgcgacaggcgccaaaaaatatgcctcaagatgctgatgccaatggtgcttatcatattgggctaaaaggtctgatgctactaggtaggatcaaaaataatcaagagggcaaaaaactcaatttggttatcaaaaatgaagagtattttgagttcgtgcagaataggaataactaattcattcaagaatatattaccctgtcagtttagcgactattacctctttaataatttgcaggggaattattttagtaatagtaatatacacaagagttattgattatatggaaaattatatttagataacatggttaaatgattttatattctgtccttactcgatatatttgcataatatctatagtaatgcctcagatactacatactattcatctagccaaacaaaagggcgcgatgctcataaaagtatcgataaaggaatctatagtaccaaaaaagatgacctgatcggtatcgatgttattaaccataaatatggtttggttggtaaaattgatgtttttcataaagataagggcttacttgtggagagaaaaaggcaaatcaagactatctatgatggctataaatatcagctttatgcgcaatatttttgtctccaagagatgggctatgatgtcaaagccattaaattttattcgatggttgataataaatcatacccaatagctataccaacttcagctgagttagaaaagtttgaaaaacatattcaaacaatcaagcaatataatccaatggataactcatttaggcaaaatattgaaaagtgtaaattttgtatatatgcaaacttatgtgataaaacggacttgtagattatgtttagtaaaaatgatattgaatcaaagaatatagtttttgttaatatttttgatggagtgaaacttagtctatcattggggaatatagttataaaagataaagaaactgatgaggtgaaaactaagctttctgttcataaagttcttgcattgtttatcgtaggtaatatgacgatgacctcgcaacttttagagacctgtaagaaaaatgctatacagctagtttttatgaaaaatagctttagaccatatctatgttttggtgatattgctgaggctaattttttagctagatataagcaatatagtgtagttgagcaagatataagtttagcaaggatttttataacatcaaagatacgcaatcaacataacttagtcaaaagcctaagagataaaactccagagcagcaagagatagtcaaaaagaataaacagctaatagcagagttagaaaatacaacaagcctagcggagctaatgggtatagagggcaatgttgccaaaaatttcttcaaaggattctatggacatttagatagttggcaagggcgcaaacctagaataaaacaggatccatataatgttgttttagacttgggctatagtatgttgtttaattttgtagagtgttttttgcgactttttggctttgatttatacaagggcttttgtcatcagacttggtataagcgtaaatccctagtttgtgactttgttgagccatttagatgtatagtggataaccaagttagaaaatcatggaatctcgggcaattttctgtagaggattttggttgcaaaaatgagcagttttatataaaaaaagataaaacaaaagactactcaaaaatactttttgccgagattatcagctacaagctagagatatttgaatatgtaagagaattttatcgtgcctttatgcgaggcaaagaaattgcagagtatccaatattttgttatgaaactaggagggtgtatgttgatagtcagttatgattttagtaataataaagtacgtgcaaagtttgccaaatttctagaaagttatggtgtacgtttacaatattcggtatttgagctcaaatatagcaagagaatgttagacttgattttagctgagatagaaaataactatgtaccactatttacaaatgctgatagtgttttaatctttaatgctccagataaagatgtgataaaatatggttatgcgattcatagagaacaagaggttgtttttatagactaaaaattgcaaaccttagtctttatgttaaaataactactaagttcttagagatatttaaaaatatgactgttgttatatatcaaaatgctaaaaaaatcatagattttaggtctttttttgctgatttaggcaaaaacgggtctaagaactttaaataatttctactgttgtagatgagaagtcatttaataaggccactgttaaaagtctaagaactttaaataatttctactgttgtagatgctactattcctgtgccttcagataattcagtctaagaactttaaataatttctactgttgtagatgtctagagccttttgtattagtagccggtctaagaactttaaataatttctactgttgtagattagcgatttatgaaggtcatttttttgtct

SEQ ID NO: 212 - DNA, 4264 bp, Artificial Sequence
  Description of Artificial Sequence: Synthetic polynucleotide
tttacactttatgcttccggctcgtatgttaggaggtctttatcatgtcaatttatcaagaatttgttaataaatatagtttaagtaaaactctaagatttgagttaatcccacagggtaaaacacttgaaaacataaaagcaagaggtttgattttagatgatgagaaaagagctaaagactacaaaaaggctaaacaaataattgataaatatcatcagttttttatagaggagatattaagttcggtttgtattagcgaagatttattacaaaactattctgatgtttattttaaacttaaaaagagtgatgatgataatctacaaaaagattttaaaagtgcaaaagatacgataaagaaacaaatatctgaatatataaaggactcagagaaatttaagaatttgtttaatcaaaaccttatcgatgctaaaaaagggcaagagtcagatttaattctatggctaaagcaatctaaggataatggtatagaactatttaaagccaatagtgatatcacagatatagatgaggcgttagaaataatcaaatcttttaaaggttggacaacttattttaagggttttcatgaaaatagaaaaaatgtttatagtagcaatgatattcctacatctattatttataggatagtagatgataatttgcctaaatttctagaaaataaagctaagtatgagagtttaaaagacaaagctccagaagctataaactatgaacaaattaaaaaagatttggcagaagagctaacctttgatattgactacaaaacatctgaagttaatcaaagagttttttcacttgatgaagtttttgagatagcaaactttaataattatctaaatcaaagtggtattactaaatttaatactattattggtggtaaatttgtaaatggtgaaaatacaaagagaaaaggtataaatgaatatataaatctatactcacagcaaataaatgataaaacactcaaaaaatataaaatgagtgttttatttaagcaaattttaagtgatacagaatctaaatcttttgtaattgataagttagaagatgatagtgatgtagttacaacgatgcaaagtttttatgagcaaatagcagcttttaaaacagtagaagaaaaatctattaaagaaacactatctttattatttgatgatttaaaagctcaaaaacttgatttgagtaaaatttattttaaaaatgataaatctcttactgatctatcacaacaagtttttgatgattatagtgttattggtacagcggtactagaatatataactcaacaaatagcacctaaaaatcttgataaccctagtaagaaagagcaagaattaatagccaaaaaaactgaaaaagcaaaatacttatctctagaaactataaagcttgccttagaagaatttaataagcatagagatatagataaacagtgtaggtttgaagaaatacttgcaaactttgcggctattccgatgatatttgatgaaatagctcaaaacaaagacaatttggcacagatatctatcaaatatcaaaatcaaggtaaaaaagacctacttcaagctagtgcggaagatgatgttaaagctatcaaggatcttttagatcaaactaataatctcttacataaactaaaaatatttcatattagtcagtcagaagataaggcaaatattttagacaaggatgagcatttttatctagtatttgaggagtgctactttgagctagcgaatatagtgcctctttataacaaaattagaaactatataactcaaaagccatatagtgatgagaaatttaagctcaattttgagaactcgactttggctaatggttgggataaaaataaagagcctgacaatacggcaattttatttatcaaagatgataaatattatctgggtgtgatgaataagaaaaataacaaaatatttgatgataaagctatcaaagaaaataaaggcgagggttataaaaaaattgtttataaacttttacctggcgcaaataaaatgttacctaaggttttcttttctgctaaatctataaaattttataatcctagtgaagatatacttagaataagaaatcattccacacatacaaaaaatggtagtcctcaaaaaggatatgaaaaatttgagtttaatattgaagattgccgaaaatttatagatttttataaacagtctataagtaagcatccggagtggaaagattttggatttagattttctgatactcaaagatataattctatagatgaattttatagagaagttgaaaatcaaggctacaaactaacttttgaaaatatatcagagagctatattgatagcgtagttaatcagggtaaattgtacctattccaaatctataataaagatttttcagcttatagcaaagggcgaccaaatctacatactttatattggaaagcgctgtttgatgagagaaatcttcaagatgtggtttataagctaaatggtgaggcagagcttttttatcgtaaacaatcaatacctaaaaaaatcactcacccagctaaagaggcaatagctaataaaaacaaagataatcctaaaaaagagagtgtttttgaatatgatttaatcaaagataaacgctttactgaagataagtttttctttcactgtcctattacaatcaattttaaatctagtggagctaataagtttaatgatgaaatcaatttattgctaaaagaaaaagcaaatgatgttcatatattaagtatagatagaggtgaaagacatttagcttactatactttggtagatggtaaaggcaatatcatcaaacaagatactttcaacatcattggtaatgatagaatgaaaacaaactaccatgataagcttgctgcaatagagaaagatagggattcagctaggaaagactggaaaaagataaataacatcaaagagatgaaagagggctatctatctcaggtagttcatgaaatagctaagctagttatagagtataatgctattgtggtttttgaggatttaaattttggatttaaaagagggcgtttcaaggtagagaagcaggtctatcaaaagttagaaaaaatgctaattgagaaactaaactatctagttttcaaagataatgagtttgataaaactgggggagtgcttagagcttatcagctaacagcaccttttgagacttttaaaaagatgggtaaacaaacaggtattatctactatgtaccagctggttttacttcaaaaatttgtcctgtaactggttttgtaaatcagttatatcctaagtatgaaagtgtcagcaaatctcaagagttctttagtaagtttgacaagatttgttataaccttgataagggctattttgagtttagttttgattataaaaactttggtgacaaggctgccaaaggcaagtggactatagctagctttgggagtagattgattaactttagaaattcagataaaaatcataattgggatactcgagaagtttatccaactaaagagttggagaaattgctaaaagattattctatcgaatatgggcatggcgaatgtatcaaagcagctatttgcggtgagagcgacaaaaagttttttgctaagctaactagtgtcctaaatactatcttacaaatgcgtaactcaaaaacaggtactgagttagattatctaatttcaccagtagcagatgtaaatggcaatttctttgattcgcgacaggcgccaaaaaatatgcctcaagatgctgatgccaatggtgcttatcatattgggctaaaaggtctgatgctactaggtaggatcaaaaataatcaagagggcaaaaaactcaatttggttatcaaaaatgaagagtattttgagttcgtgcagaataggaataactaattgacagctagctcagtcctaggtataatgctagcgctgatttaggcaaaaacgggtctaagaactttaaataatttctactgttgtagatgagaagtcatttaataaggccactgttaaaagtctaagaactttaaataatttctactgttgtagatgctactattcctgtgccttcagataattcagtctaagaactttaaataatttctactgttgtagatgtctagagccttttgtattagtagccggtctaagaactttaaataatttctactgttgtagattagcgatttatgaaggtcatttttttgtct

SEQ ID NO: 213 - DNA, 4613 bp, Artificial Sequence
  Description of Artificial Sequence: Synthetic polynucleotide
ctgtctactatgccgatgagtttggcaaaattttttagatctacaaaattataaactaaataaagattcttataataactttatatataatcgaaatgtagagaattttataaggagtctttatcatgtcaatttatcaagaatttgttaataaatatagtttaagtaaaactctaagatttgagttaatcccacagggtaaaacacttgaaaacataaaagcaagaggtttgattttagatgatgagaaaagagctaaagactacaaaaaggctaaacaaataattgataaatatcatcagttttttatagaggagatattaagttcggtttgtattagcgaagatttattacaaaactattctgatgtttattttaaacttaaaaagagtgatgatgataatctacaaaaagattttaaaagtgcaaaagatacgataaagaaacaaatatctgaatatataaaggactcagagaaatttaagaatttgtttaatcaaaaccttatcgatgctaaaaaagggcaagagtcagatttaattctatggctaaagcaatctaaggataatggtatagaactatttaaagccaatagtgatatcacagatatagatgaggcgttagaaataatcaaatcttttaaaggttggacaacttattttaagggttttcatgaaaatagaaaaaatgtttatagtagcaatgatattcctacatctattatttataggatagtagatgataatttgcctaaatttctagaaaataaagctaagtatgagagtttaaaagacaaagctccagaagctataaactatgaacaaattaaaaaagatttggcagaagagctaacctttgatattgactacaaaacatctgaagttaatcaaagagttttttcacttgatgaagtttttgagatagcaaactttaataattatctaaatcaaagtggtattactaaatttaatactattattggtggtaaatttgtaaatggtgaaaatacaaagagaaaaggtataaatgaatatataaatctatactcacagcaaataaatgataaaacactcaaaaaatataaaatgagtgttttatttaagcaaattttaagtgatacagaatctaaatcttttgtaattgataagttagaagatgatagtgatgtagttacaacgatgcaaagtttttatgagcaaatagcagcttttaaaacagtagaagaaaaatctattaaagaaacactatctttattatttgatgatttaaaagctcaaaaacttgatttgagtaaaatttattttaaaaatgataaatctcttactgatctatcacaacaagtttttgatgattatagtgttattggtacagcggtactagaatatataactcaacaaatagcacctaaaaatcttgataaccctagtaagaaagagcaagaattaatagccaaaaaaactgaaaaagcaaaatacttatctctagaaactataaagcttgccttagaagaatttaataagcatagagatatagataaacagtgtaggtttgaagaaatacttgcaaactttgcggctattccgatgatatttgatgaaatagctcaaaacaaagacaatttggcacagatatctatcaaatatcaaaatcaaggtaaaaaagacctacttcaagctagtgcggaagatgatgttaaagctatcaaggatcttttagatcaaactaataatctcttacataaactaaaaatatttcatattagtcagtcagaagataaggcaaatattttagacaaggatgagcatttttatctagtatttgaggagtgctactttgagctagcgaatatagtgcctctttataacaaaattagaaactatataactcaaaagccatatagtgatgagaaatttaagctcaattttgagaactcgactttggctaatggttgggataaaaataaagagcctgacaatacggcaattttatttatcaaagatgataaatattatctgggtgtgatgaataagaaaaataacaaaatatttgatgataaagctatcaaagaaaataaaggcgagggttataaaaaaattgtttataaacttttacctggcgcaaataaaatgttacctaaggttttcttttctgctaaatctataaaattttataatcctagtgaagatatacttagaataagaaatcattccacacatacaaaaaatggtagtcctcaaaaaggatatgaaaaatttgagtttaatattgaagattgccgaaaatttatagatttttataaacagtctataagtaagcatccggagtggaaagattttggatttagattttctgatactcaaagatataattctatagatgaattttatagagaagttgaaaatcaaggctacaaactaacttttgaaaatatatcagagagctatattgatagcgtagttaatcagggtaaattgtacctattccaaatctataataaagatttttcagcttatagcaaagggcgaccaaatctacatactttatattggaaagcgctgtttgatgagagaaatcttcaagatgtggtttataagctaaatggtgaggcagagcttttttatcgtaaacaatcaatacctaaaaaaatcactcacccagctaaagaggcaatagctaataaaaacaaagataatcctaaaaaagagagtgtttttgaatatgatttaatcaaagataaacgctttactgaagataagtttttctttcactgtcctattacaatcaattttaaatctagtggagctaataagtttaatgatgaaatcaatttattgctaaaagaaaaagcaaatgatgttcatatattaagtatagatagaggtgaaagacatttagcttactatactttggtagatggtaaaggcaatatcatcaaacaagatactttcaacatcattggtaatgatagaatgaaaacaaactaccatgataagcttgctgcaatagagaaagatagggattcagctaggaaagactggaaaaagataaataacatcaaagagatgaaagagggctatctatctcaggtagttcatgaaatagctaagctagttatagagtataatgctattgtggtttttgaggatttaaattttggatttaaaagagggcgtttcaaggtagagaagcaggtctatcaaaagttagaaaaaatgctaattgagaaactaaactatctagttttcaaagataatgagtttgataaaactgggggagtgcttagagcttatcagctaacagcaccttttgagacttttaaaaagatgggtaaacaaacaggtattatctactatgtaccagctggttttacttcaaaaatttgtcctgtaactggttttgtaaatcagttatatcctaagtatgaaagtgtcagcaaatctcaagagttctttagtaagtttgacaagatttgttataaccttgataagggctattttgagtttagttttgattataaaaactttggtgacaaggctgccaaaggcaagtggactatagctagctttgggagtagattgattaactttagaaattcagataaaaatcataattgggatactcgagaagtttatccaactaaagagttggagaaattgctaaaagattattctatcgaatatgggcatggcgaatgtatcaaagcagctatttgcggtgagagcgacaaaaagttttttgctaagctaactagtgtcctaaatactatcttacaaatgcgtaactcaaaaacaggtactgagttagattatctaatttcaccagtagcagatgtaaatggcaatttctttgattcgcgacaggcgccaaaaaatatgcctcaagatgctgatgccaatggtgcttatcatattgggctaaaaggtctgatgctactaggtaggatcaaaaataatcaagagggcaaaaaactcaatttggttatcaaaaatgaagagtattttgagttcgtgcagaataggaataactaattcattcaagaatatattaccctgtcagtttagcgactattacctctttaataatttgcaggggaattattttagtaatagtaatatacacaagagttattgattatatggaaaattatatttagataacatggttaaatgattttatattctgtccttactcgatatattttttatagactaaaaattgcaaaccttagtctttatgttaaaataactactaagttcttagagatatttaaaaatatgactgttgttatatatcaaaatgctaaaaaaatcatagattttaggtctttttttgctgatttaggcaaaaacgggtctaagaactttaaataatttctactgttgtagatgagaagtcatttaataaggccactgttaaaagtctaagaactttaaataatttctactgttgtagatgctactattcctgtgccttcagataattcagtctaagaactttaaataatttctactgttgtagatgtctagagccttttgtattagtagccggtctaagaactttaaataatttctactgttgtagattagcgatttatgaaggtcatttttttgtct

SEQ ID NO: 214 - DNA, 4035 bp, Artificial Sequence
  Description of Artificial Sequence: Synthetic polynucleotide
atgagcatctaccaggagttcgtcaacaagtattcactgagtaagacactgcggttcgagctgatcccacagggcaagacactggagaacatcaaggcccgaggcctgattctggacgatgagaagcgggcaaaagactataagaaagccaagcagatcattgataaataccaccagttctttatcgaggaaattctgagctccgtgtgcatcagtgaggatctgctgcagaattactcagacgtgtacttcaagctgaagaagagcgacgatgacaacctgcagaaggacttcaagtccgccaaggacaccatcaagaaacagattagcgagtacatcaaggactccgaaaagtttaaaaatctgttcaaccagaatctgatcgatgctaagaaaggccaggagtccgacctgatcctgtggctgaaacagtctaaggacaatgggattgaactgttcaaggctaactccgatatcactgatattgacgaggcactggaaatcatcaagagcttcaagggatggaccacatactttaaaggcttccacgagaaccgcaagaacgtgtactccagcaacgacattcctacctccatcatctaccgaatcgtcgatgacaatctgccaaagttcctggagaacaaggccaaatatgaatctctgaaggacaaagctcccgaggcaattaattacgaacagatcaagaaagatctggctgaggaactgacattcgatatcgactataagactagcgaggtgaaccagagggtcttttccctggacgaggtgtttgaaatcgccaatttcaacaattacctgaaccagtccggcattactaaattcaataccatcattggcgggaagtttgtgaacggggagaataccaagcgcaagggaattaacgaatacatcaatctgtatagccagcagatcaacgacaaaactctgaagaaatacaagatgtctgtgctgttcaaacagatcctgagtgataccgagtccaagtcttttgtcattgataaactggaagatgactcagacgtggtcactaccatgcagagcttttatgagcagatcgccgctttcaagacagtggaggaaaaatctattaaggaaactctgagtctgctgttcgatgacctgaaagcccagaagctggacctgagtaagatctacttcaaaaacgataagagtctgacagacctgtcacagcaggtgtttgatgactattccgtgattgggaccgccgtcctggagtacattacacagcagatcgctccaaagaacctggataatccctctaagaaagagcaggaactgatcgctaagaaaaccgagaaggcaaaatatctgagtctggaaacaattaagctggcactggaggagttcaacaagcacagggatattgacaaacagtgccgctttgaggaaatcctggccaacttcgcagccatccccatgatttttgatgagatcgcccagaacaaagacaatctggctcagatcagtattaagtaccagaaccagggcaagaaagacctgctgcaggcttcagcagaagatgacgtgaaagccatcaaggatctgctggaccagaccaacaatctgctgcacaagctgaaaatcttccatattagtcagtcagaggataaggctaatatcctggataaagacgaacacttctacctggtgttcgaggaatgttacttcgagctggcaaacattgtccccctgtataacaagattaggaactacatcacacagaagccttactctgacgagaagtttaaactgaacttcgaaaatagtaccctggccaacgggtgggataagaacaaggagcctgacaacacagctatcctgttcatcaaggatgacaagtactatctgggagtgatgaataagaaaaacaataagatcttcgatgacaaagccattaaggagaacaaaggggaaggatacaagaaaatcgtgtataagctgctgcccggcgcaaataagatgctgcctaaggtgttcttcagcgccaagagtatcaaattctacaacccatccgaggacatcctgcggattagaaatcactcaacacatactaagaacgggagcccccagaagggatatgagaaatttgagttcaacatcgaggattgcaggaagtttattgacttctacaagcagagcatctccaaacaccctgaatggaaggattttggcttccggttttccgacacacagagatataactctatcgacgagttctaccgcgaggtggaaaatcaggggtataagctgacttttgagaacatttctgaaagttacatcgacagcgtggtcaatcagggaaagctgtacctgttccagatctataacaaagatttttcagcatacagcaagggcagaccaaacctgcatacactgtactggaaggccctgttcgatgagaggaatctgcaggacgtggtctataaactgaacggagaggccgaactgttttaccggaagcagtctattcctaagaaaatcactcacccagctaaggaggccatcgctaacaagaacaaggacaatcctaagaaagagagcgtgttcgaatacgatctgattaaggacaagcggttcaccgaagataagttctttttccattgtccaatcaccattaacttcaagtcaagcggcgctaacaagttcaacgacgagatcaatctgctgctgaaggaaaaagcaaacgatgtgcacatcctgagcattgaccgaggagagcggcatctggcctactataccctggtggatggcaaagggaatatcattaagcaggatacattcaacatcattggcaatgaccggatgaaaaccaactaccacgataaactggctgcaatcgagaaggatagagactcagctaggaaggactggaagaaaatcaacaacattaaggagatgaaggaaggctatctgagccaggtggtccatgagattgcaaagctggtcatcgaatacaatgccattgtggtgttcgaggatctgaacttcggctttaagagggggcgctttaaggtggaaaaacaggtctatcagaagctggagaaaatgctgatcgaaaagctgaattacctggtgtttaaagataacgagttcgacaagaccggaggcgtcctgagagcctaccagctgacagctccctttgaaactttcaagaaaatgggaaaacagacaggcatcatctactatgtgccagccggattcacttccaagatctgccccgtgaccggctttgtcaaccagctgtaccctaaatatgagtcagtgagcaagtcccaggaatttttcagcaagttcgataagatctgttataatctggacaaggggtacttcgagttttccttcgattacaagaacttcggcgacaaggccgctaaggggaaatggaccattgcctccttcggatctcgcctgatcaactttcgaaattccgataaaaaccacaattgggacactagggaggtgtacccaaccaaggagctggaaaagctgctgaaagactactctatcgagtatggacatggcgaatgcatcaaggcagccatctgtggcgagagtgataagaaatttttcgccaagctgacctcagtgctgaatacaatcctgcagatgcggaactcaaagaccgggacagaactggactatctgattagccccgtggctgatgtcaacggaaacttcttcgacagcagacaggcacccaaaaatatgcctcaggatgcagacgccaacggggcctaccacatcgggctgaagggactgatgctgctgggccggatcaagaacaatcaggaggggaagaagctgaacctggtcattaagaacgaggaatacttcgagtttgtccagaatagaaataacaaaaggccggcggccacgaaaaaggccggccaggcaaaaaagaaaaagggatcctacccatacgatgttccagattacgcttatccctacgacgtgcctgattatgcatacccatatgatgtccccgactatgcc

SEQ ID NO: 215 - DNA, 3834 bp, Artificial Sequence
  Description of Artificial Sequence: Synthetic polynucleotide
atggattacggcaacggccagtttgagcggagagcccccctgaccaagacaatcaccctgcgcctgaagcctatcggcgagacacgggagacaatccgcgagcagaagctgctggagcaggacgccgccttcagaaagctggtggagacagtgacccctatcgtggacgattgtatcaggaagatcgccgataacgccctgtgccactttggcaccgagtatgacttcagctgtctgggcaacgccatctctaagaatgacagcaaggccatcaagaaggagacagagaaggtggagaagctgctggccaaggtgctgaccgagaatctgccagatggcctgcgcaaggtgaacgacatcaattccgccgcctttatccaggatacactgacctctttcgtgcaggacgatgccgacaagcgggtgctgatccaggagctgaagggcaagaccgtgctgatgcagcggttcctgaccacacggatcacagccctgaccgtgtggctgcccgacagagtgttcgagaactttaatatcttcatcgagaacgccgagaagatgagaatcctgctggactcccctctgaatgagaagatcatgaagtttgacccagatgccgagcagtacgcctctctggagttctatggccagtgcctgtctcagaaggacatcgatagctacaacctgatcatctccggcatctatgccgacgatgaggtgaagaaccctggcatcaatgagatcgtgaaggagtacaatcagcagatccggggcgacaaggatgagtccccactgcccaagctgaagaagctgcacaagcagatcctgatgccagtggagaaggccttctttgtgcgcgtgctgtctaacgacagcgatgcccggagcatcctggagaagatcctgaaggacacagagatgctgccctccaagatcatcgaggccatgaaggaggcagatgcaggcgacatcgccgtgtacggcagccggctgcacgagctgagccacgtgatctacggcgatcacggcaagctgtcccagatcatctatgacaaggagtccaagaggatctctgagctgatggagacactgtctccaaaggagcgcaaggagagcaagaagcggctggagggcctggaggagcacatcagaaagtctacatacaccttcgacgagctgaacaggtatgccgagaagaatgtgatggcagcatacatcgcagcagtggaggagtcttgtgccgagatcatgagaaaggagaaggatctgaggaccctgctgagcaaggaggacgtgaagatccggggcaacagacacaatacactgatcgtgaagaactactttaatgcctggaccgtgttccggaacctgatcagaatcctgaggcgcaagtccgaggccgagatcgactctgacttctacgatgtgctggacgattccgtggaggtgctgtctctgacatacaagggcgagaatctgtgccgcagctatatcaccaagaagatcggctccgacctgaagcccgagatcgccacatacggcagcgccctgaggcctaacagccgctggtggtccccaggagagaagtttaatgtgaagttccacaccatcgtgcggagagatggccggctgtactatttcatcctgcccaagggcgccaagcctgtggagctggaggacatggatggcgacatcgagtgtctgcagatgagaaagatccctaacccaacaatctttctgcccaagctggtgttcaaggaccctgaggccttctttagggataatccagaggccgacgagttcgtgtttctgagcggcatgaaggcccccgtgacaatcaccagagagacatacgaggcctacaggtataagctgtataccgtgggcaagctgcgcgatggcgaggtgtccgaagaggagtacaagcgggccctgctgcaggtgctgaccgcctacaaggagtttctggagaacagaatgatctatgccgacctgaatttcggctttaaggatctggaggagtataaggacagctccgagtttatcaagcaggtggagacacacaacaccttcatgtgctgggccaaggtgtctagctcccagctggacgatctggtgaagtctggcaacggcctgctgttcgagatctggagcgagcgcctggagtcctactataagtacggcaatgagaaggtgctgcggggctatgagggcgtgctgctgagcatcctgaaggatgagaacctggtgtccatgcggaccctgctgaacagccggcccatgctggtgtaccggccaaaggagtctagcaagcctatggtggtgcaccgggatggcagcagagtggtggacaggtttgataaggacggcaagtacatcccccctgaggtgcacgacgagctgtatcgcttctttaacaatctgctgatcaaggagaagctgggcgagaaggcccggaagatcctggacaacaagaaggtgaaggtgaaggtgctggagagcgagagagtgaagtggtccaagttctacgatgagcagtttgccgtgaccttcagcgtgaagaagaacgccgattgtctggacaccacaaaggacctgaatgccgaagtgatggagcagtatagcgagtccaacagactgatcctgatcaggaataccacagatatcctgtactatctggtgctggacaagaatggcaaggtgctgaagcagagatccctgaacatcatcaatgacggcgccagggatgtggactggaaggagaggttccgccaggtgacaaaggatagaaacgagggctacaatgagtgggattattccaggacctctaacgacctgaaggaggtgtacctgaattatgccctgaaggagatcgccgaggccgtgatcgagtacaacgccatcctgatcatcgagaagatgtctaatgcctttaaggacaagtatagcttcctggacgacgtgaccttcaagggcttcgagacaaagctgctggccaagctgagcgatctgcactttaggggcatcaaggacggcgagccatgttccttcacaaaccccctgcagctgtgccagaacgattctaataagatcctgcaggacggcgtgatctttatggtgccaaattctatgacacggagcctggaccccgacaccggcttcatctttgccatcaacgaccacaatatcaggaccaagaaggccaagctgaactttctgagcaagttcgatcagctgaaggtgtcctctgagggctgcctgatcatgaagtacagcggcgattccctgcctacacacaacaccgacaatcgcgtgtggaactgctgttgcaatcacccaatcacaaactatgaccgggagacaaagaaggtggagttcatcgaggagcccgtggaggagctgtcccgcgtgctggaggagaatggcatcgagacagacaccgagctgaacaagctgaatgagcgggagaacgtgcctggcaaggtggtggatgccatctactctctggtgctgaattatctgcgcggcacagtgagcggagtggcaggacagagggccgtgtactatagccctgtgaccggcaagaagtacgatatctcctttatccaggccatgaacctgaataggaagtgtgactactataggatcggctccaaggagaggggagagtggaccgatttcgtggcccagctgatcaacaaaaggccggcggccacgaaaaaggccggccaggcaaaaaagaaaaagggatcctacccatacgatgttccagattacgcttatccctacgacgtgcctgattatgcatacccatatgatgtccccgactatgcc

SEQ ID NO: 216 - DNA, 4035 bp, Artificial Sequence; identical to SEQ ID NO: 214
  Description of Artificial Sequence: Synthetic polynucleotide

SEQ ID NO: 217 - DNA, 4575 bp, Artificial Sequence
  Description of Artificial Sequence: Synthetic polynucleotide
atgtccaacttctttaagaatttcaccaacctgtatgagctgtccaagacactgaggtttgagctgaagcccgtgggcgacaccctgacaaacatgaaggaccacctggagtacgatgagaagctgcagaccttcctgaaggatcagaatatcgacgatgcctatcaggccctgaagcctcagttcgacgagatccacgaggagtttatcacagattctctggagagcaagaaggccaaggagatcgacttctccgagtacctggatctgtttcaggagaagaaggagctgaacgactctgagaagaagctgcgcaacaagatcggcgagacattcaacaaggccggcgagaagtggaagaaggagaagtaccctcagtatgagtggaagaagggctccaagatcgccaatggcgccgacatcctgtcttgccaggatatgctgcagtttatcaagtataagaacccagaggatgagaagatcaagaattacatcgacgatacactgaagggcttctttacctatttcggcggctttaatcagaacagggccaactactatgagacaaagaaggaggcctccaccgcagtggcaacaaggatcgtgcacgagaacctgccaaagttctgtgacaatgtgatccagtttaagcacatcatcaagcggaagaaggatggcaccgtggagaaaaccgagagaaagaccgagtacctgaacgcctaccagtatctgaagaacaataacaagatcacacagatcaaggacgccgagacagagaagatgatcgagtctacacccatcgccgagaagatcttcgacgtgtactacttcagcagctgcctgagccagaagcagatcgaggagtacaaccggatcatcggccactataatctgctgatcaacctgtataaccaggccaagagatctgagggcaagcacctgagcgccaacgagaagaagtataaggacctgcctaagttcaagaccctgtataagcagatcggctgcggcaagaagaaggacctgttttacacaatcaagtgtgataccgaggaggaggccaataagtcccggaacgagggcaaggagtcccactctgtggaggagatcatcaacaaggcccaggaggccatcaataagtacttcaagtctaataacgactgtgagaatatcaacaccgtgcccgacttcatcaactatatcctgacaaaggagaattacgagggcgtgtattggagcaaggccgccatgaacaccatctccgacaagtacttcgccaattatcacgacctgcaggatagactgaaggaggccaaggtgtttcagaaggccgataagaagtccgaggacgatatcaagatcccagaggccatcgagctgtctggcctgttcggcgtgctggacagcctggccgattggcagaccacactgtttaagtctagcatcctgagcaacgaggacaagctgaagatcatcacagattcccagaccccctctgaggccctgctgaagatgatcttcaatgacatcgagaagaacatggagtcctttctgaaggagacaaacgatatcatcaccctgaagaagtataagggcaataaggagggcaccgagaagatcaagcagtggttcgactatacactggccatcaaccggatgctgaagtactttctggtgaaggagaataagatcaagggcaactccctggataccaatatctctgaggccctgaaaaccctgatctacagcgacgatgccgagtggttcaagtggtacgacgccctgagaaactatctgacccagaagcctcaggatgaggccaaggagaataagctgaagctgaatttcgacaacccatctctggccggcggctgggatgtgaacaaggagtgcagcaatttttgcgtgatcctgaaggacaagaacgagaagaagtacctggccatcatgaagaagggcgagaataccctgttccagaaggagtggacagagggccggggcaagaacctgacaaagaagtctaatccactgttcgagatcaataactgcgagatcctgagcaagatggagtatgacttttgggccgacgtgagcaagatgatccccaagtgtagcacccagctgaaggccgtggtgaaccacttcaagcagtccgacaatgagttcatctttcctatcggctacaaggtgacaagcggcgagaagtttagggaggagtgcaagatctccaagcaggacttcgagctgaataacaaggtgtttaataagaacgagctgagcgtgaccgccatgcgctacgatctgtcctctacacaggagaagcagtatatcaaggccttccagaaggagtactgggagctgctgtttaagcaggagaagcgggacaccaagctgacaaataacgagatcttcaacgagtggatcaatttttgcaacaagaagtatagcgagctgctgtcctgggagagaaagtacaaggatgccctgaccaattggatcaacttctgtaagtactttctgagcaagtatcccaagaccacactgttcaactactcttttaaggagagcgagaattataactccctggacgagttctaccgggacgtggatatctgttcttacaagctgaatatcaacaccacaatcaataagagcatcctggatagactggtggaggagggcaagctgtacctgtttgagatcaagaatcaggacagcaacgatggcaagtccatcggccacaagaataacctgcacaccatctactggaacgccatcttcgagaattttgacaacaggcctaagctgaatggcgaggccgagatcttctatcgcaaggccatctccaaggataagctgggcatcgtgaagggcaagaaaaccaagaacggcaccgagatcatcaagaattacagattcagcaaggagaagtttatcctgcacgtgccaatcaccctgaacttctgctccaataacgagtatgtgaatgacatcgtgaacacaaagttctacaatttttccaacctgcactttctgggcatcgataggggcgagaagcacctggcctactattctctggtgaataagaacggcgagatcgtggaccagggcacactgaacctgcctttcaccgacaaggatggcaatcagcgcagcatcaagaaggagaagtacttttataacaagcaggaggacaagtgggaggccaaggaggtggattgttggaattataacgacctgctggatgccatggcctctaaccgggacatggccagaaagaattggcagaggatcggcaccatcaaggaggccaagaacggctacgtgagcctggtcatcaggaagatcgccgatctggccgtgaataacgagcgccccgccttcatcgtgctggaggacctgaatacaggctttaagcggtccagacagaagatcgataagagcgtgtaccagaagttcgagctggccctggccaagaagctgaactttctggtggacaagaatgccaagcgcgatgagatcggctcccctacaaaggccctgcagctgaccccccctgtgaataactacggcgacattgagaacaagaagcaggccggcatcatgctgtatacccgggccaattatacctctcagacagatccagccacaggctggagaaagaccatctatctgaaggccggccccgaggagacaacatacaagaaggacggcaagatcaagaacaagagcgtgaaggaccagatcatcgagacattcaccgatatcggctttgacggcaaggattactatttcgagtacgacaagggcgagtttgtggatgagaaaaccggcgagatcaagcccaagaagtggcggctgtactccggcgagaatggcaagtccctggacaggttccgcggagagagggagaaggataagtatgagtggaagatcgacaagatcgatatcgtgaagatcctggacgatctgttcgtgaattttgacaagaacatcagcctgctgaagcagctgaaggagggcgtggagctgacccggaataacgagcacggcacaggcgagtccctgagattcgccatcaacctgatccagcagatccggaataccggcaataacgagagagacaacgatttcatcctgtccccagtgagggacgagaatggcaagcactttgactctcgcgagtactgggataaggagacaaagggcgagaagatcagcatgcccagctccggcgatgccaatggcgccttcaacatcgcccggaagggcatcatcatgaacgcccacatcctggccaatagcgactccaaggatctgtccctgttcgtgtctgacgaggagtgggatctgcacctgaataacaagaccgagtggaagaagcagctgaacatcttttctagcaggaaggccatggccaagcgcaagaagaaaaggccggcggccacgaaaaaggccggccaggcaaaaaagaaaaagggatcctacccatacgatgttccagattacgcttatccctacgacgtgcctgattatgcatacccatatgatgtccccgactatgcctaagaattc

SEQ ID NO: 218 - DNA, 4200 bp, Artificial Sequence
  Description of Artificial Sequence: Synthetic polynucleotide
atggagaacatcttcgaccagtttatcggcaagtacagcctgtccaagaccctgagattcgagctgaagcccgtgggcaagacagaggacttcctgaagatcaacaaggtgtttgagaaggatcagaccatcgacgatagctacaatcaggccaagttctattttgattccctgcaccagaagtttatcgacgccgccctggcctccgataagacatccgagctgtctttccagaactttgccgacgtgctggagaagcagaataagatcatcctggataagaagagagagatgggcgccctgaggaagcgcgacaagaacgccgtgggcatcgataggctgcagaaggagatcaatgacgccgaggatatcatccagaaggagaaggagaagatctacaaggacgtgcgcaccctgttcgataacgaggccgagtcttggaaaacctactatcaggagcgggaggtggacggcaagaagatcaccttcagcaaggccgacctgaagcagaagggcgccgattttctgacagccgccggcatcctgaaggtgctgaagtatgagttccccgaggagaaggagaaggagtttcaggccaagaaccagccctccctgttcgtggaggagaaggagaatcctggccagaagaggtacatcttcgactcttttgataagttcgccggctatctgaccaagtttcagcagacaaagaagaatctgtacgcagcagacggcaccagcacagcagtggccacccgcatcgccgataactttatcatcttccaccagaataccaaggtgttccgggacaagtacaagaacaatcacacagacctgggcttcgatgaggagaacatctttgagatcgagaggtataagaattgcctgctgcagcgcgagatcgagcacatcaagaatgagaatagctacaacaagatcatcggccggatcaataagaagatcaaggagtatcgggaccagaaggccaaggataccaagctgacaaagtccgacttccctttctttaagaacctggataagcagatcctgggcgaggtggagaaggagaagcagctgatcgagaaaacccgggagaaaaccgaggaggacgtgctgatcgagcggttcaaggagttcatcgagaacaatgaggagaggttcaccgccgccaagaagctgatgaatgccttctgtaacggcgagtttgagtccgagtacgagggcatctatctgaagaataaggccatcaacacaatctcccggagatggttcgtgtctgacagagattttgagctgaagctgcctcagcagaagtccaagaacaagtctgagaagaatgagccaaaggtgaagaagttcatctccatcgccgagatcaagaacgccgtggaggagctggacggcgatatctttaaggccgtgttctacgacaagaagatcatcgcccagggcggctctaagctggagcagttcctggtcatctggaagtacgagtttgagtatctgttccgggacatcgagagagagaacggcgagaagctgctgggctatgatagctgcctgaagatcgccaagcagctgggcatcttcccacaggagaaggaggcccgcgagaaggcaaccgccgtgatcaagaattacgccgacgccggcctgggcatcttccagatgatgaagtatttttctctggacgataaggatcggaagaacacccccggccagctgagcacaaatttctacgccgagtatgacggctactacaaggatttcgagtttatcaagtactacaacgagtttaggaacttcatcaccaagaagcctttcgacgaggataagatcaagctgaactttgagaatggcgccctgctgaagggctgggacgagaacaaggagtacgatttcatgggcgtgatcctgaagaaggagggccgcctgtatctgggcatcatgcacaagaaccaccggaagctgtttcagtccatgggcaatgccaagggcgacaacgccaatagataccagaagatgatctataagcagatcgccgacgcctctaaggatgtgcccaggctgctgctgaccagcaagaaggccatggagaagttcaagccttcccaggagatcctgagaatcaagaaggagaaaaccttcaagcgggagagcaagaacttttccctgagagatctgcacgccctgatcgagtactataggaactgcatccctcagtacagcaattggtccttttatgacttccagtttcaggataccggcaagtaccagaatatcaaggagttcacagacgatgtgcagaagtacggctataagatctcctttcgcgacatcgacgatgagtatatcaatcaggccctgaacgagggcaagatgtacctgttcgaggtggtgaacaaggatatctataacaccaagaatggctccaagaatctgcacacactgtactttgagcacatcctgtctgccgagaacctgaatgacccagtgttcaagctgtctggcatggccgagatctttcagcggcagcccagcgtgaacgaaagagagaagatcaccacacagaagaatcagtgtatcctggacaagggcgatagagcctacaagtataggcgctacaccgagaagaagatcatgttccacatgagcctggtgctgaacacaggcaagggcgagatcaagcaggtgcagtttaataagatcatcaaccagaggatcagctcctctgacaacgagatgagggtgaatgtgatcggcatcgatcgcggcgagaagaacctgctgtactatagcgtggtgaagcagaatggcgagatcatcgagcaggcctccctgaacgagatcaatggcgtgaactaccgggacaagctgatcgagagggagaaggagcgcctgaagaaccggcagagctggaagcctgtggtgaagatcaaggatctgaagaagggctacatctcccacgtgatccacaagatctgccagctgatcgagaagtattctgccatcgtggtgctggaggacctgaatatgagattcaagcagatcaggggaggaatcgagcggagcgtgtaccagcagttcgagaaggccctgatcgataagctgggctatctggtgtttaaggacaacagggatctgagggcaccaggaggcgtgctgaatggctaccagctgtctgccccctttgtgagcttcgagaagatgcgcaagcagaccggcatcctgttctacacacaggccgagtataccagcaagacagacccaatcaccggctttcggaagaacgtgtatatctctaatagcgcctccctggataagatcaaggaggccgtgaagaagttcgacgccatcggctgggatggcaaggagcagtcttacttctttaagtacaacccttacaacctggccgacgagaagtataagaactctaccgtgagcaaggagtgggccatctttgccagcgccccaagaatccggagacagaagggcgaggacggctactggaagtatgatagggtgaaagtgaatgaggagttcgagaagctgctgaaggtctggaattttgtgaacccaaaggccacagatatcaagcaggagatcatcaagaaggagaaggcaggcgacctgcagggagagaaggagctggatggccggctgagaaacttttggcactctttcatctacctgtttaacctggtgctggagctgcgcaattctttcagcctgcagatcaagatcaaggcaggagaagtgatcgcagtggacgagggcgtggacttcatcgccagcccagtgaagcccttctttaccacacccaacccttacatcccctccaacctgtgctggctggccgtggagaatgcagacgcaaacggagcctataatatcgccaggaagggcgtgatgatcctgaagaagatccgcgagcacgccaagaaggaccccgagttcaagaagctgccaaacctgtttatcagcaatgcagagtgggacgaggcagcccgggattggggcaagtacgcaggcaccacagccctgaacctggaccacaaaaggccggcggccacgaaaaaggccggccaggcaaaaaagaaaaagggatcctacccatacgatgttccagattacgcttatccctacgacgtgcctgattatgcatacccatatgatgtccccgactatgcctaagaattc

SEQ ID NO: 219 - DNA, 3894 bp, Artificial Sequence
  Description of Artificial Sequence: Synthetic polynucleotide
atgcagaccctgtttgagaacttcacaaatcagtacccagtgtccaagaccctgcgctttgagctgatcccccagggcaagacaaaggacttcatcgagcagaagggcctgctgaagaaggatgaggaccgggccgagaagtataagaaggtgaagaacatcatcgatgagtaccacaaggacttcatcgagaagtctctgaatggcctgaagctggacggcctggagaagtacaagaccctgtatctgaagcaggagaaggacgataaggataagaaggcctttgacaaggagaaggagaacctgcgcaagcagatcgccaatgccttccggaacaatgagaagtttaagacactgttcgccaaggagctgatcaagaacgatctgatgtctttcgcctgcgaggaggacaagaagaatgtgaaggagtttgaggccttcaccacatacttcaccggcttccaccagaaccgcgccaatatgtacgtggccgatgagaagagaacagccatcgccagcaggctgatccacgagaacctgccaaagtttatcgacaatatcaagatcttcgagaagatgaagaaggaggcccccgagctgctgtctcctttcaaccagaccctgaaggatatgaaggacgtgatcaagggcaccacactggaggagatctttagcctggattatttcaacaagaccctgacacagagcggcatcgacatctacaattccgtgatcggcggcagaacccctgaggagggcaagacaaagatcaagggcctgaacgagtacatcaataccgacttcaaccagaagcagacagacaagaagaagcggcagccaaagttcaagcagctgtataagcagatcctgagcgataggcagagcctgtcctttatcgccgaggccttcaagaacgacaccgagatcctggaggccatcgagaagttttacgtgaatgagctgctgcacttcagcaatgagggcaagtccacaaacgtgctggacgccatcaagaatgccgtgtctaacctggagagctttaacctgaccaagatgtatttccgctccggcgcctctctgacagacgtgagccggaaggtgtttggcgagtggagcatcatcaatagagccctggacaactactatgccaccacatatccaatcaagcccagagagaagtctgagaagtacgaggagaggaaggagaagtggctgaagcaggacttcaacgtgagcctgatccagaccgccatcgatgagtacgacaacgagacagtgaagggcaagaacagcggcaaagtgatcgccgattattttgccaagttctgcgacgataaggagacagacctgatccagaaggtgaacgagggctacatcgccgtgaaggatctgctgaatacaccctgtcctgagaacgagaagctgggcagcaataaggaccaggtgaagcagatcaaggcctttatggattctatcatggacatcatgcacttcgtgcgccccctgagcctgaaggataccgacaaggagaaggatgagacattctactccctgttcacacctctgtacgaccacctgacccagacaatcgccctgtataacaaggtgcggaactatctgacccagaagccttacagcacagagaagatcaagctgaacttcgagaacagcaccctgctgggcggctgggatctgaataaggagacagacaacacagccatcatcctgaggaaggataacctgtactatctgggcatcatggacaagaggcacaatcgcatctttcggaacgtgcccaaggccgataagaaggacttctgctacgagaagatggtgtataagctgctgcctggcgccaacaagatgctgccaaaggtgttcttttctcagagcagaatccaggagtttaccccttccgccaagctgctggagaactacgccaatgagacacacaagaagggcgataatttcaacctgaatcactgtcacaagctgatcgatttctttaaggactctatcaacaagcacgaggattggaagaatttcgactttaggttcagcgccacctccacctacgccgacctgagcggcttttaccacgaggtggagcaccagggctacaagatctcttttcagagcgtggccgattccttcatcgacgatctggtgaacgagggcaagctgtacctgttccagatctataataaggacttttccccattctctaagggcaagcccaacctgcacaccctgtactggaagatgctgtttgatgagaacaatctgaaggacgtggtgtataagctgaatggcgaggccgaggtgttctaccgcaagaagagcattgccgagaagaacaccacaatccacaaggccaatgagtccatcatcaacaagaatcctgataacccaaaggccaccagcaccttcaactatgatatcgtgaaggacaagagatacaccatcgacaagtttcagttccacatcccaatcacaatgaactttaaggccgagggcatcttcaacatgaatcagagggtgaatcagttcctgaaggccaatcccgatatcaacatcatcggcatcgacagaggcgagaggcacctgctgtactatgccctgatcaaccagaagggcaagatcctgaagcaggataccctgaatgtgatcgccaacgagaagcagaaggtggactaccacaatctgctggataagaaggagggcgaccgcgcaaccgcaaggcaggagtggggcgtgatcgagacaatcaaggagctgaaggagggctatctgtcccaggtcatccacaagctgaccgatctgatgatcgagaacaatgccatcatcgtgatggaggacctgaactttggcttcaagcggggcagacagaaggtggagaagcaggtgtatcagaagtttgagaagatgctgatcgataagctgaattacctggtggacaagaataagaaggcaaacgagctgggaggcctgctgaacgcattccagctggccaataagtttgagtccttccagaagatgggcaagcagaacggctttatcttctacgtgcccgcctggaatacctctaagacagatcctgccaccggctttatcgacttcctgaagccccgctatgagaacctgaatcaggccaaggatttctttgagaagtttgactctatccggctgaacagcaaggccgattactttgagttcgcctttgacttcaagaatttcaccgagaaggccgatggcggcagaaccaagtggacagtgtgcaccacaaacgaggacagatatgcctggaatagggccctgaacaataacaggggcagccaggagaagtacgacatcacagccgagctgaagtccctgttcgatggcaaggtggactataagtctggcaaggatctgaagcagcagatcgccagccaggagtccgccgacttctttaaggccctgatgaagaacctgtccatcaccctgtctctgagacacaataacggcgagaagggcgataatgagcaggactacatcctgtcccctgtggccgattctaagggccgcttctttgactcccggaaggccgacgatgacatgccaaagaatgccgacgccaacggcgcctatcacatcgccctgaagggcctgtggtgtctggagcagatcagcaagaccgatgacctgaagaaggtgaagctggccatctccaacaaggagtggctggagttcgtgcagacactgaagggcaaaaggccggcggccacgaaaaaggccggccaggcaaaaaagaaaaagggatcctacccatacgatgttccagattacgcttatccctacgacgtgcctgattatgcatacccatatgatgtccccgactatgcctaagaattc

SEQ ID NO: 220 - DNA, 4065 bp, Artificial Sequence
  Description of Artificial Sequence: Synthetic polynucleotide
atgacacagttcgagggctttaccaacctgtatcaggtgagcaagacactgcggtttgagctgatcccacagggcaagaccctgaagcacatccaggagcagggcttcatcgaggaggacaaggcccgcaatgatcactacaaggagctgaagcccatcatcgatcggatctacaagacctatgccgaccagtgcctgcagctggtgcagctggattgggagaacctgagcgccgccatcgactcctatagaaaggagaaaaccgaggagacaaggaacgccctgatcgaggagcaggccacatatcgcaatgccatccacgactacttcatcggccggacagacaacctgaccgatgccatcaataagagacacgccgagatctacaagggcctgttcaaggccgagctgtttaatggcaaggtgctgaagcagctgggcaccgtgaccacaaccgagcacgagaacgccctgctgcggagcttcgacaagtttacaacctacttctccggcttttatgagaacaggaagaacgtgttcagcgccgaggatatcagcacagccatcccacaccgcatcgtgcaggacaacttccccaagtttaaggagaattgtcacatcttcacacgcctgatcaccgccgtgcccagcctgcgggagcactttgagaacgtgaagaaggccatcggcatcttcgtgagcacctccatcgaggaggtgttttccttccctttttataaccagctgctgacacagacccagatcgacctgtataaccagctgctgggaggaatctctcgggaggcaggcaccgagaagatcaagggcctgaacgaggtgctgaatctggccatccagaagaatgatgagacagcccacatcatcgcctccctgccacacagattcatccccctgtttaagcagatcctgtccgataggaacaccctgtctttcatcctggaggagtttaagagcgacgaggaagtgatccagtccttctgcaagtacaagacactgctgagaaacgagaacgtgctggagacagccgaggccctgtttaacgagctgaacagcatcgacctgacacacatcttcatcagccacaagaagctggagacaatcagcagcgccctgtgcgaccactgggatacactgaggaatgccctgtatgagcggagaatctccgagctgacaggcaagatcaccaagtctgccaaggagaaggtgcagcgcagcctgaagcacgaggatatcaacctgcaggagatcatctctgccgcaggcaaggagctgagcgaggccttcaagcagaaaaccagcgagatcctgtcccacgcacacgccgccctggatcagccactgcctacaaccctgaagaagcaggaggagaaggagatcctgaagtctcagctggacagcctgctgggcctgtaccacctgctggactggtttgccgtggatgagtccaacgaggtggaccccgagttctctgcccggctgaccggcatcaagctggagatggagccttctctgagcttctacaacaaggccagaaattatgccaccaagaagccctactccgtggagaagttcaagctgaactttcagatgcctacactggcctctggctgggacgtgaataaggagaagaacaatggcgccatcctgtttgtgaagaacggcctgtactatctgggcatcatgccaaagcagaagggcaggtataaggccctgagcttcgagcccacagagaaaaccagcgagggctttgataagatgtactatgactacttccctgatgccgccaagatgatcccaaagtgcagcacccagctgaaggccgtgacagcccactttcagacccacacaacccccatcctgctgtccaacaatttcatcgagcctctggagatcacaaaggagatctacgacctgaacaatcctgagaaggagccaaagaagtttcagacagcctacgccaagaaaaccggcgaccagaagggctacagagaggccctgtgcaagtggatcgacttcacaagggattttctgtccaagtataccaagacaacctctatcgatctgtctagcctgcggccatcctctcagtataaggacctgggcgagtactatgccgagctgaatcccctgctgtaccacatcagcttccagagaatcgccgagaaggagatcatggatgccgtggagacaggcaagctgtacctgttccagatctataacaaggactttgccaagggccaccacggcaagcctaatctgcacacactgtattggaccggcctgttttctccagagaacctggccaagacaagcatcaagctgaatggccaggccgagctgttctaccgccctaagtccaggatgaagaggatggcacaccggctgggagagaagatgctgaacaagaagctgaaggatcagaaaaccccaatccccgacaccctgtaccaggagctgtacgactatgtgaatcacagactgtcccacgacctgtctgatgaggccagggccctgctgcccaacgtgatcaccaaggaggtgtctcacgagatcatcaaggataggcgctttaccagcgacaagttctttttccacgtgcctatcacactgaactatcaggccgccaattccccatctaagttcaaccagagggtgaatgcctacctgaaggagcaccccgagacacctatcatcggcatcgatcggggcgagagaaacctgatctatatcacagtgatcgactccaccggcaagatcctggagcagcggagcctgaacaccatccagcagtttgattaccagaagaagctggacaacagggagaaggagagggtggcagcaaggcaggcctggtctgtggtgggcacaatcaaggatctgaagcagggctatctgagccaggtcatccacgagatcgtggacctgatgatccactaccaggccgtggtggtgctggagaacctgaatttcggctttaagagcaagaggaccggcatcgccgagaaggccgtgtaccagcagttcgagaagatgctgatcgataagctgaattgcctggtgctgaaggactatccagcagagaaagtgggaggcgtgctgaacccataccagctgacagaccagttcacctcctttgccaagatgggcacccagtctggcttcctgttttacgtgcctgccccatatacatctaagatcgatcccctgaccggcttcgtggaccccttcgtgtggaaaaccatcaagaatcacgagagccgcaagcacttcctggagggcttcgactttctgcactacgacgtgaaaaccggcgacttcatcctgcactttaagatgaacagaaatctgtccttccagaggggcctgcccggctttatgcctgcatgggatatcgtgttcgagaagaacgagacacagtttgacgccaagggcacccctttcatcgccggcaagagaatcgtgccagtgatcgagaatcacagattcaccggcagataccgggacctgtatcctgccaacgagctgatcgccctgctggaggagaagggcatcgtgttcagggatggctccaacatcctgccaaagctgctggagaatgacgattctcacgccatcgacaccatggtggccctgatccgcagcgtgctgcagatgcggaactccaatgccgccacaggcgaggactatatcaacagccccgtgcgcgatctgaatggcgtgtgcttcgactcccggtttcagaacccagagtggcccatggacgccgatgccaatggcgcctaccacatcgccctgaagggccagctgctgctgaatcacctgaaggagagcaaggatctgaagctgcagaacggcatctccaatcaggactggctggcctacatccaggagctgcgcaacaaaaggccggcggccacgaaaaaggccggccaggcaaaaaagaaaaagggatcctacccatacgatgttccagattacgcttatccctacgacgtgcctgattatgcatacccatatgatgtccccgactatgcctaagaattc

SEQ ID NO: 221 - DNA, 3762 bp, Artificial Sequence
  Description of Artificial Sequence: Synthetic polynucleotide
atgtactatgagtccctgaccaagcagtaccccgtgtctaagacaatccggaatgagctgatccctatcggcaagacactggataacatccgccagaacaatatcctggagagcgacgtgaagcggaagcagaactacgagcacgtgaagggcatcctggatgagtatcacaagcagctgatcaacgaggccctggacaattgcaccctgccatccctgaagatcgccgccgagatctacctgaagaatcagaaggaggtgtctgacagagaggatttcaacaagacacaggacctgctgaggaaggaggtggtggagaagctgaaggcccacgagaactttaccaagatcggcaagaaggacatcctggatctgctggagaagctgccttccatctctgaggacgattacaatgccctggagagcttccgcaacttttacacctatttcacatcctacaacaaggtgcgggagaatctgtattctgataaggagaagagctccacagtggcctacagactgatcaacgagaatttcccaaagtttctggacaatgtgaagagctataggtttgtgaaaaccgcaggcatcctggcagatggcctgggagaggaggagcaggactccctgttcatcgtggagacattcaacaagaccctgacacaggacggcatcgatacctacaattctcaagtgggcaagatcaactctagcatcaatctgtataaccagaagaatcagaaggccaatggcttcagaaagatccccaagatgaagatgctgtataagcagatcctgtccgatagggaggagtctttcatcgacgagtttcagagcgatgaggtgctgatcgacaacgtggagtcttatggcagcgtgctgatcgagtctctgaagtcctctaaggtgagcgccttctttgatgccctgagagagtctaagggcaagaacgtgtacgtgaagaatgacctggccaagacagccatgagcaacatcgtgttcgagaattggaggacctttgacgatctgctgaaccaggagtacgacctggccaacgagaacaagaagaaggacgataagtatttcgagaagcgccagaaggagctgaagaagaataagagctactccctggagcacctgtgcaacctgtccgaggattcttgtaacctgatcgagaattatatccaccagatctccgacgatatcgagaatatcatcatcaacaatgagacattcctgcgcatcgtgatcaatgagcacgacaggtcccgcaagctggccaagaaccggaaggccgtgaaggccatcaaggactttctggattctatcaaggtgctggagcgggagctgaagctgatcaacagctccggccaggagctggagaaggatctgatcgtgtactctgcccacgaggagctgctggtggagctgaagcaggtggacagcctgtataacatgaccagaaattatctgacaaagaagcctttctctaccgagaaggtgaagctgaactttaatcgcagcacactgctgaacggctgggatcggaataaggagacagacaacctgggcgtgctgctgctgaaggacggcaagtactatctgggcatcatgaacacaagcgccaataaggccttcgtgaatccccctgtggccaagaccgagaaggtgtttaagaaggtggattacaagctgctgccagtgcccaaccagatgctgccaaaggtgttctttgccaagagcaatatcgacttctataacccctctagcgagatctactccaattataagaagggcacccacaagaagggcaatatgttttccctggaggattgtcacaacctgatcgacttctttaaggagtctatcagcaagcacgaggactggagcaagttcggctttaagttcagcgatacagcctcctacaacgacatctccgagttctatcgcgaggtggagaagcagggctacaagctgacctatacagacatcgatgagacatacatcaatgatctgatcgagcggaacgagctgtacctgttccagatctataataaggactttagcatgtactccaagggcaagctgaacctgcacacactgtatttcatgatgctgtttgatcagcgcaatatcgacgacgtggtgtataagctgaacggagaggcagaggtgttctataggccagcctccatctctgaggacgagctgatcatccacaaggccggcgaggagatcaagaacaagaatcctaaccgggccagaaccaaggagacaagcaccttcagctacgacatcgtgaaggataagcggtatagcaaggataagtttaccctgcacatccccatcacaatgaacttcggcgtggatgaggtgaagcggttcaacgacgccgtgaacagcgccatccggatcgatgagaatgtgaacgtgatcggcatcgaccggggcgagagaaatctgctgtacgtggtggtcatcgactctaagggcaacatcctggagcagatctccctgaactctatcatcaataaggagtacgacatcgagacagattatcacgcactgctggatgagagggagggcggcagagataaggcccggaaggactggaacaccgtggagaatatcagggacctgaaggccggctacctgagccaggtggtgaacgtggtggccaagctggtgctgaagtataatgccatcatctgcctggaggacctgaactttggcttcaagaggggccgccagaaggtggagaagcaggtgtaccagaagttcgagaagatgctgatcgataagctgaattacctggtcatcgacaagagccgcgagcagacatcccctaaggagctgggaggcgccctgaacgcactgcagctgacctctaagttcaagagctttaaggagctgggcaagcagtccggcgtgatctactatgtgcctgcctacctgacctctaagatcgatccaaccacaggcttcgccaatctgttttatatgaagtgtgagaacgtggagaagtccaagagattctttgacggctttgatttcatcaggttcaacgccctggagaacgtgttcgagttcggctttgactaccggagcttcacccagagggcctgcggcatcaattccaagtggaccgtgtgcaccaacggcgagcgcatcatcaagtatcggaatccagataagaacaatatgttcgacgagaaggtggtggtggtgaccgatgagatgaagaacctgtttgagcagtacaagatcccctatgaggatggcagaaatgtgaaggacatgatcatcagcaacgaggaggccgagttctaccggagactgtataggctgctgcagcagaccctgcagatgagaaacagcacctccgacggcacaagggattacatcatctcccctgtgaagaataagagagaggcctacttcaacagcgagctgtccgacggctctgtgccaaaggacgccgatgccaacggcgcctacaatatcgccagaaagggcctgtgggtgctggagcagatcaggcagaagagcgagggcgagaagatcaatctggccatgaccaacgccgagtggctggagtatgcccagacacacctgctgaaaaggccggcggccacgaaaaaggccggccaggcaaaaaagaaaaagggatcctacccatacgatgttccagattacgcttatccctacgacgtgcctgattatgcatacccatatgatgtccccgactatgcctaagaattc

SEQ ID NO: 222 - DNA, 3858 bp, Artificial Sequence
  Description of Artificial Sequence: Synthetic polynucleotide
atgaacaattacgacgagttcaccaagctgtatcctatccagaaaaccatccggtttgagctgaagccacagggcagaaccatggagcacctggagacattcaacttctttgaggaggaccgggatagagccgagaagtataagatcctgaaggaggccatcgacgagtaccacaagaagtttatcgatgagcacctgaccaatatgtccctggattggaactctctgaagcagatcagcgagaagtactataagagcagggaggagaaggacaagaaggtgttcctgtccgagcagaagaggatgcgccaggagatcgtgtctgagtttaagaaggacgatcgcttcaaggacctgttttccaagaagctgttctctgagctgctgaaggaggagatctacaagaagggcaaccaccaggagatcgacgccctgaagagcttcgataagttttccggctatttcatcggcctgcacgagaataggaagaacatgtactccgacggcgatgagatcaccgccatctccaatcgcatcgtgaatgagaacttccccaagtttctggataacctgcagaagtaccaggaggccaggaagaagtatcctgagtggatcatcaaggccgagagcgccctggtggcccacaatatcaagatggacgaggtgttctccctggagtactttaataaggtgctgaaccaggagggcatccagcggtacaacctggccctgggcggctatgtgaccaagagcggcgagaagatgatgggcctgaatgatgccctgaacctggcccaccagtccgagaagagctccaagggcagaatccacatgacccccctgttcaagcagatcctgtccgagaaggagtccttctcttacatccccgacgtgtttacagaggattctcagctgctgcctagcatcggcggcttctttgcccagatcgagaatgacaaggatggcaacatcttcgaccgggccctggagctgatctctagctacgccgagtatgataccgagcggatctatatcagacaggccgacatcaatagagtgtccaacgtgatctttggagagtggggcaccctgggaggcctgatgagggagtacaaggccgactctatcaatgatatcaacctggagcgcacatgcaagaaggtggacaagtggctggattctaaggagtttgccctgagcgatgtgctggaggccatcaagaggaccggcaacaatgacgccttcaacgagtatatctccaagatgcggacagccagagagaagatcgatgccgcccgcaaggagatgaagttcatcagcgagaagatctccggcgatgaggagtctatccacatcatcaagaccctgctggacagcgtgcagcagttcctgcacttctttaatctgtttaaggcaaggcaggacatcccactggatggagccttctacgccgagtttgacgaggtgcacagcaagctgtttgccatcgtgcccctgtataacaaggtgcggaactatctgaccaagaacaatctgaacacaaagaagatcaagctgaatttcaagaaccctacactggccaatggctgggaccagaacaaggtgtacgattatgcctccctgatctttctgcgggacggcaattactatctgggcatcatcaatcctaagagaaagaagaacatcaagttcgagcagggctctggcaacggccccttctaccggaagatggtgtataagcagatccccggccctaataagaacctgccaagagtgttcctgacctccacaaagggcaagaaggagtataagccctctaaggagatcatcgagggctacgaggccgacaagcacatcaggggcgataagttcgacctggatttttgtcacaagctgatcgatttctttaaggagtccatcgagaagcacaaggactggtctaagttcaacttctacttcagcccaaccgagagctatggcgacatctctgagttctacctggatgtggagaagcagggctatcgcatgcactttgagaatatcagcgccgagacaatcgacgagtatgtggagaagggcgatctgtttctgttccagatctacaacaaggattttgtgaaggccgccaccggcaagaaggacatgcacacaatctactggaatgccgccttcagccccgagaacctgcaggacgtggtggtgaagctgaacggcgaggccgagctgttttatagggacaagtccgatatcaaggagatcgtgcaccgcgagggcgagatcctggtgaataggacctacaacggccgcacaccagtgcccgacaagatccacaagaagctgaccgattatcacaatggccggacaaaggacctgggcgaggccaaggagtacctggataaggtgagatacttcaaggcccactatgacatcaccaaggatcggagatacctgaacgacaagatctatttccacgtgcctctgaccctgaacttcaaggccaacggcaagaagaatctgaacaagatggtcatcgagaagttcctgtccgatgagaaggcccacatcatcggcatcgacaggggcgagcgcaatctgctgtactattccatcatcgacaggtctggcaagatcatcgatcagcagagcctgaatgtgatcgacggctttgattatcgggagaagctgaaccagagagagatcgagatgaaggatgcccgccagtcttggaacgccatcggcaagatcaaggacctgaaggagggctacctgagcaaggccgtgcacgagatcaccaagatggccatccagtataatgccatcgtggtcatggaggagctgaactacggcttcaagcggggccggttcaaggtggagaagcagatctatcagaagttcgagaatatgctgatcgataagatgaactacctggtgtttaaggacgcacctgatgagtccccaggaggcgtgctgaatgcctaccagctgacaaacccactggagtctttcgccaagctgggcaagcagaccggcatcctgttttacgtgccagccgcctatacatccaagatcgaccccaccacaggcttcgtgaatctgtttaacacctcctctaagacaaacgcccaggagcggaaggagttcctgcagaagtttgagagcatctcctattctgccaaggatggcggcatctttgccttcgcctttgactacagaaagttcggcaccagcaagacagatcacaagaacgtgtggaccgcctatacaaacggcgagaggatgcgctacatcaaggagaagaagcggaatgagctgtttgacccttctaaggagatcaaggaggccctgaccagctccggcatcaagtacgatggcggccagaacatcctgccagacatcctgaggagcaacaataacggcctgatctacacaatgtattctagcttcatcgccgccatccagatgcgcgtgtacgacggcaaggaggattatatcatcagccccatcaagaactccaagggcgagttctttaggaccgaccccaagaggcgcgagctgcctatcgacgccgatgccaatggcgcctacaacatcgccctgaggggagagctgacaatgagggcaatcgcagagaagttcgaccctgatagcgagaagatggccaagctggagctgaagcacaaggattggttcgagtttatgcagaccagaggcgacaaaaggccggcggccacgaaaaaggccggccaggcaaaaaagaaaaagggatcctacccatacgatgttccagattacgcttatccctacgacgtgcctgattatgcatacccatatgatgtccccgactatgcctaagaattc

SEQ ID NO: 223 - DNA, 3990 bp, Artificial Sequence
  Description of Artificial Sequence: Synthetic polynucleotide
atgaacggcaataggtccatcgtgtaccgcgagttcgtgggcgtgatccccgtggccaagaccctgaggaatgagctgcgccctgtgggccacacacaggagcacatcatccagaacggcctgatccaggaggacgagctgcggcaggagaagagcaccgagctgaagaacatcatggacgattactatagagagtacatcgataagtctctgagcggcgtgaccgacctggacttcaccctgctgttcgagctgatgaacctggtgcagagctccccctccaaggacaataagaaggccctggagaaggagcagtctaagatgagggagcagatctgcacccacctgcagtccgactctaactacaagaatatctttaacgccaagctgctgaaggagatcctgcctgatttcatcaagaactacaatcagtatgacgtgaaggataaggccggcaagctggagacactggccctgtttaatggcttcagcacatactttaccgacttctttgagaagaggaagaacgtgttcaccaaggaggccgtgagcacatccatcgcctaccgcatcgtgcacgagaactccctgatcttcctggccaatatgacctcttataagaagatcagcgagaaggccctggatgagatcgaagtgatcgagaagaacaatcaggacaagatgggcgattgggagctgaatcagatctttaaccctgacttctacaatatggtgctgatccagtccggcatcgacttctacaacgagatctgcggcgtggtgaatgcccacatgaacctgtactgtcagcagaccaagaacaattataacctgttcaagatgcggaagctgcacaagcagatcctggcctacaccagcaccagcttcgaggtgcccaagatgttcgaggacgatatgagcgtgtataacgccgtgaacgccttcatcgacgagacagagaagggcaacatcatcggcaagctgaaggatatcgtgaataagtacgacgagctggatgagaagagaatctatatcagcaaggacttttacgagacactgagctgcttcatgtccggcaactggaatctgatcacaggctgcgtggagaacttctacgatgagaacatccacgccaagggcaagtccaaggaggagaaggtgaagaaggccgtgaaggaggacaagtacaagtctatcaatgacgtgaacgatctggtggagaagtatatcgatgagaaggagaggaatgagttcaagaacagcaatgccaagcagtacatccgcgagatctccaacatcatcaccgacacagagacagcccacctggagtatgacgatcacatctctctgatcgagagcgaggagaaggccgacgagatgaagaagcggctggatatgtatatgaacatgtaccactgggccaaggcctttatcgtggacgaggtgctggacagagatgagatgttctacagcgatatcgacgatatctataatatcctggagaacatcgtgccactgtataatcgggtgagaaactacgtgacccagaagccctacaactctaagaagatcaagctgaatttccagagccctacactggccaatggctggtcccagtctaaggagttcgacaacaatgccatcatcctgatcagagataacaagtactatctggccatcttcaatgccaagaacaagccagacaagaagatcatccagggcaactccgataagaagaacgacaacgattacaagaagatggtgtataacctgctgccaggcgccaacaagatgctgcccaaggtgtttctgtctaagaagggcatcgagacattcaagccctccgactatatcatctctggctacaacgcccacaagcacatcaagacaagcgagaattttgatatctccttctgtcgggacctgatcgattacttcaagaacagcatcgagaagcacgccgagtggagaaagtatgagttcaagttttccgccaccgacagctactccgatatctctgagttctatcgggaggtggagatgcagggctacagaatcgactggacatatatcagcgaggccgacatcaacaagctggatgaggagggcaagatctatctgtttcagatctacaataaggatttcgccgagaacagcaccggcaaggagaatctgcacacaatgtactttaagaacatcttctccgaggagaatctgaaggacatcatcatcaagctgaacggccaggccgagctgttttatcggagagcctctgtgaagaatcccgtgaagcacaagaaggatagcgtgctggtgaacaagacctacaagaatcagctggacaacggcgacgtggtgagaatccccatccctgacgatatctataacgagatctacaagatgtataatggctacatcaaggagtccgacctgtctgaggccgccaaggagtacctggataaggtggaggtgaggaccgcccagaaggacatcgtgaaggattaccgctatacagtggacaagtacttcatccacacacctatcaccatcaactataaggtgaccgcccgcaacaatgtgaatgatatggtggtgaagtacatcgcccagaacgacgatatccacgtgatcggcatcgaccggggcgagagaaacctgatctacatctccgtgatcgattctcacggcaacatcgtgaagcagaaatcctacaacatcctgaacaactacgactacaagaagaagctggtggagaaggagaaaacccgggagtacgccagaaagaactggaagagcatcggcaatatcaaggagctgaaggagggctatatctccggcgtggtgcacgagatcgccatgctgatcgtggagtacaacgccatcatcgccatggaggacctgaattatggctttaagaggggccgcttcaaggtggagcggcaggtgtaccagaagtttgagagcatgctgatcaataagctgaactatttcgccagcaaggagaagtccgtggacgagccaggaggcctgctgaagggctatcagctgacctacgtgcccgataatatcaagaacctgggcaagcagtgcggcgtgatcttttacgtgcctgccgccttcaccagcaagatcgacccatccacaggctttatctctgccttcaactttaagtctatcagcacaaatgcctctcggaagcagttctttatgcagtttgacgagatcagatactgtgccgagaaggatatgttcagctttggcttcgactacaacaacttcgatacctacaacatcacaatgggcaagacacagtggaccgtgtatacaaacggcgagagactgcagtctgagttcaacaatgccaggcgcaccggcaagacaaagagcatcaatctgacagagacaatcaagctgctgctggaggacaatgagatcaactacgccgacggccacgatatcaggatcgatatggagaagatggacgaggataagaagagcgagttctttgcccagctgctgagcctgtataagctgaccgtgcagatgcgcaattcctatacagaggccgaggagcaggagaacggcatctcttacgacaagatcatcagccctgtgatcaatgatgagggcgagttctttgactccgataactataaggagtctgacgataaggagtgcaagatgccaaaggacgccgatgccaacggcgcctactgtatcgccctgaagggcctgtatgaggtgctgaagatcaagagcgagtggaccgaggacggctttgataggaattgcctgaagctgccacacgcagagtggctggacttcatccagaacaagcggtacgagaaaaggccggcggccacgaaaaaggccggccaggcaaaaaagaaaaagggatcctacccatacgatgttccagattacgcttatccctacgacgtgcctgattatgcatacccatatgatgtccccgactatgcctaagaattc

SEQ ID NO: 224 - DNA, 4263 bp, Artificial Sequence
  Description of Artificial Sequence: Synthetic polynucleotide
atgctgttccaggactttacccacctgtatccactgtccaagacagtgagatttgagctgaagcccatcgataggaccctggagcacatccacgccaagaacttcctgtctcaggacgagacaatggccgatatgcaccagaaggtgaaagtgatcctggacgattaccaccgcgacttcatcgccgatatgatgggcgaggtgaagctgaccaagctggccgagttctatgacgtgtacctgaagtttcggaagaacccaaaggacgatgagctgcagaagcagctgaaggatctgcaggccgtgctgagaaaggagatcgtgaagcccatcggcaatggcggcaagtataaggccggctacgacaggctgttcggcgccaagctgtttaaggacggcaaggagctgggcgatctggccaagttcgtgatcgcacaggagggagagagctccccaaagctggcccacctggcccacttcgagaagttttccacctatttcacaggctttcacgataaccggaagaatatgtattctgacgaggataagcacaccgccatcgcctaccgcctgatccacgagaacctgccccggtttatcgacaatctgcagatcctgaccacaatcaagcagaagcactctgccctgtacgatcagatcatcaacgagctgaccgccagcggcctggacgtgtctctggccagccacctggatggctatcacaagctgctgacacaggagggcatcaccgcctacaatacactgctgggaggaatctccggagaggcaggctctcctaagatccagggcatcaacgagctgatcaattctcaccacaaccagcactgccacaagagcgagagaatcgccaagctgaggccactgcacaagcagatcctgtccgacggcatgagcgtgtccttcctgccctctaagtttgccgacgatagcgagatgtgccaggccgtgaacgagttctatcgccactacgccgacgtgttcgccaaggtgcagagcctgttcgacggctttgacgatcaccagaaggatggcatctacgtggagcacaagaacctgaatgagctgtccaagcaggccttcggcgactttgcactgctgggacgcgtgctggacggatactatgtggatgtggtgaatccagagttcaacgagcggtttgccaaggccaagaccgacaatgccaaggccaagctgacaaaggagaaggataagttcatcaagggcgtgcactccctggcctctctggagcaggccatcgagcactataccgcaaggcacgacgatgagagcgtgcaggcaggcaagctgggacagtacttcaagcacggcctggccggagtggacaaccccatccagaagatccacaacaatcacagcaccatcaagggctttctggagagggagcgccctgcaggagagagagccctgccaaagatcaagtccggcaagaatcctgagatgacacagctgaggcagctgaaggagctgctggataacgccctgaatgtggcccacttcgccaagctgctgaccacaaagaccacactggacaatcaggatggcaacttctatggcgagtttggcgtgctgtacgacgagctggccaagatccccaccctgtataacaaggtgagagattacctgagccagaagcctttctccaccgagaagtacaagctgaactttggcaatccaacactgctgaatggctgggacctgaacaaggagaaggataatttcggcgtgatcctgcagaaggacggctgctactatctggccctgctggacaaggcccacaagaaggtgtttgataacgcccctaatacaggcaagagcatctatcagaagatgatctataagtacctggaggtgaggaagcagttccccaaggtgttcttttccaaggaggccatcgccatcaactaccacccttctaaggagctggtggagatcaaggacaagggccggcagagatccgacgatgagcgcctgaagctgtatcggtttatcctggagtgtctgaagatccaccctaagtacgataagaagttcgagggcgccatcggcgacatccagctgtttaagaaggataagaagggcagagaggtgccaatcagcgagaaggacctgttcgataagatcaacggcatcttttctagcaagcctaagctggagatggaggacttctttatcggcgagttcaagaggtataacccaagccaggacctggtggatcagtataatatctacaagaagatcgactccaacgataatcgcaagaaggagaatttctacaacaatcaccccaagtttaagaaggatctggtgcggtactattacgagtctatgtgcaagcacgaggagtgggaggagagcttcgagttttccaagaagctgcaggacatcggctgttacgtggatgtgaacgagctgtttaccgagatcgagacacggagactgaattataagatctccttctgcaacatcaatgccgactacatcgatgagctggtggagcagggccagctgtatctgttccagatctacaacaaggacttttccccaaaggcccacggcaagcccaatctgcacaccctgtacttcaaggccctgttttctgaggacaacctggccgatcctatctataagctgaatggcgaggcccagatcttctacagaaaggcctccctggacatgaacgagacaacaatccacagggccggcgaggtgctggagaacaagaatcccgataatcctaagaagagacagttcgtgtacgacatcatcaaggataagaggtacacacaggacaagttcatgctgcacgtgccaatcaccatgaactttggcgtgcagggcatgacaatcaaggagttcaataagaaggtgaaccagtctatccagcagtatgacgaggtgaacgtgatcggcatcgatcggggcgagagacacctgctgtacctgaccgtgatcaatagcaagggcgagatcctggagcagtgttccctgaacgacatcaccacagcctctgccaatggcacacagatgaccacaccttaccacaagatcctggataagagggagatcgagcgcctgaacgcccgggtgggatggggcgagatcgagacaatcaaggagctgaagtctggctatctgagccacgtggtgcaccagatcagccagctgatgctgaagtacaacgccatcgtggtgctggaggacctgaatttcggctttaagaggggccgctttaaggtggagaagcagatctatcagaacttcgagaatgccctgatcaagaagctgaaccacctggtgctgaaggacaaggccgacgatgagatcggctcttacaagaatgccctgcagctgaccaacaatttcacagatctgaagagcatcggcaagcagaccggcttcctgttttatgtgcccgcctggaacacctctaagatcgaccctgagacaggctttgtggatctgctgaagccaagatacgagaacatcgcccagagccaggccttctttggcaagttcgacaagatctgctataatgccgacaaggattacttcgagtttcacatcgactacgccaagtttaccgataaggccaagaatagccgccagatctggacaatctgttcccacggcgacaagcggtacgtgtacgataagacagccaaccagaataagggcgccgccaagggcatcaacgtgaatgatgagctgaagtccctgttcgcccgccaccacatcaacgagaagcagcccaacctggtcatggacatctgccagaacaatgataaggagtttcacaagtctctgatgtacctgctgaaaaccctgctggccctgcggtacagcaacgcctcctctgacgaggatttcatcctgtcccccgtggcaaacgacgagggcgtgttctttaatagcgccctggccgacgatacacagcctcagaatgccgatgccaacggcgcctaccacatcgccctgaagggcctgtggctgctgaatgagctgaagaactccgacgatctgaacaaggtgaagctggccatcgacaatcagacctggctgaatttcgcccagaacaggaaaaggccggcggccacgaaaaaggccggccaggcaaaaaagaaaaagggatcctacccatacgatgttccagattacgcttatccctacgacgtgcctgattatgcatacccatatgatgtccccgactatgcctaagaattc

SEQ ID NO: 225 - DNA, 3933 bp, Artificial Sequence
  Description of Artificial Sequence: Synthetic polynucleotide
atggaggactattccggctttgtgaacatctactctatccagaaaaccctgaggttcgagctgaagccagtgggcaagacactggagcacatcgagaagaagggcttcctgaagaaggacaagatccgggccgaggattacaaggccgtgaagaagatcatcgataagtaccacagagcctatatcgaggaggtgtttgattccgtgctgcaccagaagaagaagaaggacaagacccgcttttctacacagttcatcaaggagatcaaggagttcagcgagctgtactataagaccgagaagaacatccccgacaaggagaggctggaggccctgagcgagaagctgcgcaagatgctggtgggcgcctttaagggcgagttctccgaggaggtggccgagaagtataagaacctgttttctaaggagctgatcaggaatgagatcgagaagttctgcgagacagacgaggagcgcaagcaggtgtctaacttcaagagcttcaccacatactttaccggcttccactccaacaggcagaatatctattccgacgagaagaagtctacagccatcggctaccgcatcatccaccagaacctgcctaagttcctggataatctgaagatcatcgagtccatccagcggcggttcaaggacttcccatggtctgatctgaagaagaacctgaagaagatcgataagaatatcaagctgaccgagtacttcagcatcgacggcttcgtgaacgtgctgaatcagaagggcatcgatgcctacaacacaatcctgggcggcaagtccgaggagtctggcgagaagatccagggcctgaacgagtacatcaatctgtatcggcagaagaacaatatcgacagaaagaacctgcccaatgtgaagatcctgtttaagcagatcctgggcgatagggagacaaagagctttatccctgaggccttcccagacgatcagtccgtgctgaactctatcacagagttcgccaagtacctgaagctggataagaagaagaagagcatcatcgccgagctgaagaagtttctgagctccttcaatcgctacgagctggacggcatctatctggccaacgataatagcctggcctctatcagcaccttcctgtttgacgattggtcctttatcaagaagtccgtgtctttcaagtatgacgagtccgtgggcgaccccaagaagaagatcaagtctcccctgaagtacgagaaggagaaggagaagtggctgaagcagaagtactatacaatctctttcctgaacgatgccatcgagagctattccaagtctcaggacgagaagagggtgaagatccgcctggaggcctactttgccgagttcaagagcaaggacgatgccaagaagcagttcgacctgctggagaggatcgaggaggcctatgccatcgtggagcctctgctgggagcagagtacccaagggaccgcaacctgaaggccgataagaaggaagtgggcaagatcaaggacttcctggatagcatcaagtccctgcagttctttctgaagcctctgctgtccgccgagatctttgacgagaaggatctgggcttctacaatcagctggagggctactatgaggagatcgattctatcggccacctgtataacaaggtgcggaattatctgaccggcaagatctacagcaaggagaagtttaagctgaacttcgagaacagcaccctgctgaagggctgggacgagaaccgggaggtggccaatctgtgcgtgatcttcagagaggaccagaagtactatctgggcgtgatggataaggagaacaataccatcctgtccgacatccccaaggtgaagcctaacgagctgttttacgagaagatggtgtataagctgatccccacacctcacatgcagctgccccggatcatcttctctagcgacaacctgtctatctataatcctagcaagtccatcctgaagatcagagaggccaagagctttaaggagggcaagaacttcaagctgaaggactgtcacaagtttatcgatttctacaaggagtctatcagcaagaatgaggactggagcagattcgacttcaagttcagcaagaccagcagctacgagaacatcagcgagttttaccgggaggtggagagacagggctataacctggacttcaagaaggtgtctaagttctacatcgacagcctggtggaggatggcaagctgtacctgttccagatctataacaaggacttttctatcttcagcaagggcaagcccaatctgcacaccatctattttcggtccctgttctctaaggagaacctgaaggacgtgtgcctgaagctgaatggcgaggccgagatgttctttcggaagaagtccatcaactacgatgagaagaagaagcgggagggccaccaccccgagctgtttgagaagctgaagtatcctatcctgaaggacaagagatacagcgaggataagtttcagttccacctgcccatcagcctgaacttcaagtccaaggagcggctgaactttaatctgaaagtgaatgagttcctgaagagaaacaaggacatcaatatcatcggcatcgatcggggcgagagaaacctgctgtacctggtcatgatcaatcagaagggcgagatcctgaagcagaccctgctggacagcatgcagtccggcaagggccggcctgagatcaactacaaggagaagctgcaggagaaggagatcgagagggataaggcccgcaagagctggggcacagtggagaatatcaaggagctgaaggagggctatctgtctatcgtgatccaccagatcagcaagctgatggtggagaacaatgccatcgtggtgctggaggacctgaacatcggctttaagcggggcagacagaaggtggagcggcaggtgtaccagaagttcgagaagatgctgatcgataagctgaactttctggtgttcaaggagaataagccaaccgagccaggaggcgtgctgaaggcctatcagctgacagacgagtttcagtctttcgagaagctgagcaagcagaccggctttctgttctacgtgccaagctggaacacctccaagatcgaccccagaacaggctttatcgatttcctgcaccctgcctacgagaatatcgagaaggccaagcagtggatcaacaagtttgattccatcaggttcaattctaagatggactggtttgagttcaccgccgatacacgcaagttttccgagaacctgatgctgggcaagaatcgggtgtgggtcatctgcaccacaaatgtggagcggtacttcaccagcaagaccgccaacagctccatccagtacaatagcatccagatcaccgagaagctgaaggagctgtttgtggacatccctttcagcaacggccaggatctgaagccagagatcctgaggaagaatgacgccgtgttctttaagagcctgctgttttacatcaagaccacactgtccctgcgccagaacaatggcaagaagggcgaggaggagaaggacttcatcctgagcccagtggtggattccaagggccggttctttaactctctggaggccagcgacgatgagcccaaggacgccgatgccaatggcgcctaccacatcgccctgaagggcctgatgaacctgctggtgctgaatgagacaaaggaggagaacctgagcagaccaaagtggaagatcaagaataaggactggctggagttcgtgtgggagaggaaccgcaaaaggccggcggccacgaaaaaggccggccaggcaaaaaagaaaaagggatcctacccatacgatgttccagattacgcttatccctacgacgtgcctgattatgcatacccatatgatgtccccgactatgcctaagaattc

SEQ ID NO: 226 - DNA, 3828 bp, Artificial Sequence
  Description of Artificial Sequence: Synthetic polynucleotide
atgagcaagctggagaagtttacaaactgctactccctgtctaagaccctgaggttcaaggccatccctgtgggcaagacccaggagaacatcgacaataagcggctgctggtggaggacgagaagagagccgaggattataagggcgtgaagaagctgctggatcgctactatctgtcttttatcaacgacgtgctgcacagcatcaagctgaagaatctgaacaattacatcagcctgttccggaagaaaaccagaaccgagaaggagaataaggagctggagaacctggagatcaatctgcggaaggagatcgccaaggccttcaagggcaacgagggctacaagtccctgtttaagaaggatatcatcgagacaatcctgccagagttcctggacgataaggacgagatcgccctggtgaacagcttcaatggctttaccacagccttcaccggcttctttgataacagagagaatatgttttccgaggaggccaagagcacatccatcgccttcaggtgtatcaacgagaatctgacccgctacatctctaatatggacatcttcgagaaggtggacgccatctttgataagcacgaggtgcaggagatcaaggagaagatcctgaacagcgactatgatgtggaggatttctttgagggcgagttctttaactttgtgctgacacaggagggcatcgacgtgtataacgccatcatcggcggcttcgtgaccgagagcggcgagaagatcaagggcctgaacgagtacatcaacctgtataatcagaaaaccaagcagaagctgcctaagtttaagccactgtataagcaggtgctgagcgatcgggagtctctgagcttctacggcgagggctatacatccgatgaggaggtgctggaggtgtttagaaacaccctgaacaagaacagcgagatcttcagctccatcaagaagctggagaagctgttcaagaattttgacgagtactctagcgccggcatctttgtgaagaacggccccgccatcagcacaatctccaaggatatcttcggcgagtggaacgtgatccgggacaagtggaatgccgagtatgacgatatccacctgaagaagaaggccgtggtgaccgagaagtacgaggacgatcggagaaagtccttcaagaagatcggctccttttctctggagcagctgcaggagtacgccgacgccgatctgtctgtggtggagaagctgaaggagatcatcatccagaaggtggatgagatctacaaggtgtatggctcctctgagaagctgttcgacgccgattttgtgctggagaagagcctgaagaagaacgacgccgtggtggccatcatgaaggacctgctggattctgtgaagagcttcgagaattacatcaaggccttctttggcgagggcaaggagacaaacagggacgagtccttctatggcgattttgtgctggcctacgacatcctgctgaaggtggaccacatctacgatgccatccgcaattatgtgacccagaagccctactctaaggataagttcaagctgtattttcagaaccctcagttcatgggcggctgggacaaggataaggagacagactatcgggccaccatcctgagatacggctccaagtactatctggccatcatggataagaagtacgccaagtgcctgcagaagatcgacaaggacgatgtgaacggcaattacgagaagatcaactataagctgctgcccggccctaataagatgctgccaaaggtgttcttttctaagaagtggatggcctactataaccccagcgaggacatccagaagatctacaagaatggcacattcaagaagggcgatatgtttaacctgaatgactgtcacaagctgatcgacttctttaaggatagcatctcccggtatccaaagtggtccaatgcctacgatttcaacttttctgagacagagaagtataaggacatcgccggcttttacagagaggtggaggagcagggctataaggtgagcttcgagtctgccagcaagaaggaggtggataagctggtggaggagggcaagctgtatatgttccagatctataacaaggacttttccgataagtctcacggcacacccaatctgcacaccatgtacttcaagctgctgtttgacgagaacaatcacggacagatcaggctgagcggaggagcagagctgttcatgaggcgcgcctccctgaagaaggaggagctggtggtgcacccagccaactcccctatcgccaacaagaatccagataatcccaagaaaaccacaaccctgtcctacgacgtgtataaggataagaggttttctgaggaccagtacgagctgcacatcccaatcgccatcaataagtgccccaagaacatcttcaagatcaatacagaggtgcgcgtgctgctgaagcacgacgataacccctatgtgatcggcatcgataggggcgagcgcaatctgctgtatatcgtggtggtggacggcaagggcaacatcgtggagcagtattccctgaacgagatcatcaacaacttcaacggcatcaggatcaagacagattaccactctctgctggacaagaaggagaaggagaggttcgaggcccgccagaactggacctccatcgagaatatcaaggagctgaaggccggctatatctctcaggtggtgcacaagatctgcgagctggtggagaagtacgatgccgtgatcgccctggaggacctgaactctggctttaagaatagccgcgtgaaggtggagaagcaggtgtatcagaagttcgagaagatgctgatcgataagctgaactacatggtggacaagaagtctaatccttgtgcaacaggcggcgccctgaagggctatcagatcaccaataagttcgagagctttaagtccatgtctacccagaacggcttcatcttttacatccctgcctggctgacatccaagatcgatccatctaccggctttgtgaacctgctgaaaaccaagtataccagcatcgccgattccaagaagttcatcagctcctttgacaggatcatgtacgtgcccgaggaggatctgttcgagtttgccctggactataagaacttctctcgcacagacgccgattacatcaagaagtggaagctgtactcctacggcaaccggatcagaatcttccggaatcctaagaagaacaacgtgttcgactgggaggaggtgtgcctgaccagcgcctataaggagctgttcaacaagtacggcatcaattatcagcagggcgatatcagagccctgctgtgcgagcagtccgacaaggccttctactctagctttatggccctgatgagcctgatgctgcagatgcggaacagcatcacaggccgcaccgacgtggattttctgatcagccctgtgaagaactccgacggcatcttctacgatagccggaactatgaggcccaggagaatgccatcctgccaaagaacgccgacgccaatggcgcctataacatcgccagaaaggtgctgtgggccatcggccagttcaagaaggccgaggacgagaagctggataaggtgaagatcgccatctctaacaaggagtggctggagtacgcccagaccagcgtgaagcacaaaaggccggcggccacgaaaaaggccggccaggcaaaaaagaaaaagggatcctacccatacgatgttccagattacgcttatccctacgacgtgcctgattatgcatacccatatgatgtccccgactatgcctaagaattc

SEQ ID NO: 227 - DNA, 3924 bp, Artificial Sequence
  Description of Artificial Sequence: Synthetic polynucleotide
atggacagcctgaaggatttcaccaacctgtaccccgtgtccaagacactgcggtttgagctgaagcctgtgggcaagaccctggagaatatcgagaaggccggcatcctgaaggaggatgagcacagagccgagagctaccggagagtgaagaagatcatcgatacatatcacaaggtgttcatcgacagctccctggagaacatggccaagatgggcatcgagaatgagatcaaggccatgctgcagtccttttgcgagctgtataagaaggaccacaggaccgagggagaggacaaggccctggataagatcagggccgtgctgaggggcctgatcgtgggagccttcaccggcgtgtgcggccggcgggagaacacagtgcagaatgagaagtatgagagcctgtttaaggagaagctgatcaaggagatcctgccagatttcgtgctgtctacagaggccgagtccctgcccttttctgtggaggaggccaccagaagcctgaaggagttcgactcctttacatcttacttcgccggcttttatgagaaccggaagaatatctactctaccaagccccagagcacagccatcgcctatagactgatccacgagaacctgcctaagttcatcgataatatcctggtgtttcagaagatcaaggagccaatcgccaaggagctggagcacatcagggcagacttcagcgccggcggctacatcaagaaggatgagcgcctggaggacatcttttccctgaactactatatccacgtgctgtctcaggccggcatcgagaagtacaatgccctgatcggcaagatcgtgaccgagggcgatggcgagatgaagggcctgaacgagcacatcaacctgtataatcagcagaggggccgcgaggaccggctgccactgttcagacccctgtataagcagatcctgtctgatagggagcagctgtcctatctgccagagtctttcgagaaggacgaggagctgctgagggccctgaaggagttttacgatcacatcgcagaggacatcctgggaaggacccagcagctgatgacaagcatctccgagtacgatctgtcccggatctatgtgagaaacgatagccagctgaccgacatctccaagaagatgctgggcgattggaatgccatctacatggcccgggagagagcctatgaccacgagcaggcccccaagcgcatcacagccaagtacgagagggaccgcatcaaggccctgaagggcgaggagtctatcagcctggccaacctgaacagctgcatcgccttcctggacaacgtgagggattgtcgcgtggacacctatctgtctacactgggacagaaggagggacctcacggcctgagcaacctggtggagaacgtgttcgcctcctaccacgaggccgagcagctgctgtcttttccctatcctgaggagaacaatctgatccaggacaaggataacgtggtgctgatcaagaacctgctggataatatcagcgacctgcagaggttcctgaagccactgtggggcatgggcgatgagcccgacaaggatgagaggttttacggcgagtacaattatatcaggggcgccctggaccaggtcatccctctgtataacaaggtgcggaattatctgacccgcaagccatactccacacgcaaggtgaagctgaacttcggcaatagccagctgctgtccggctgggataggaacaaggagaaggacaattcttgcgtgatcctgcgcaagggccagaacttctacctggccatcatgaacaatcggcacaagcggagcttcgagaataagatgctgcccgagtataaggagggcgagccttacttcgagaagatggattataagtttctgccagaccccaacaagatgctgcccaaggtgttcctgtctaagaagggcatcgagatctacaagcctagcccaaagctgctggagcagtatggccacggcacccacaagaagggcgataccttcagcatggacgatctgcacgagctgatcgacttctttaagcactccatcgaggcccacgaggattggaagcagttcggctttaagttcagcgacaccgccacatacgagaacgtgagcagcttctaccgggaggtggaggaccagggctacaagctgtcttttagaaaggtgtccgagtcttacgtgtatagcctgatcgatcagggcaagctgtacctgttccagatctataacaaggactttagcccttgttccaagggcaccccaaatctgcacacactgtactggcggatgctgttcgatgagagaaacctggccgacgtgatctataagctggatggcaaggccgagatcttctttcgggagaagtccctgaagaatgaccacccaacccaccctgcaggcaagcccatcaagaagaagagccggcagaagaagggcgaggagagcctgttcgagtacgatctggtgaaggaccggagatataccatggataagtttcagttccacgtgccaatcacaatgaactttaagtgctctgccggcagcaaggtgaacgacatggtgaatgcccacatcagggaggccaaggacatgcacgtgatcggcatcgataggggcgagcgcaatctgctgtatatctgcgtgatcgacagccgcggcaccatcctggatcagatctccctgaacacaatcaatgacatcgattatcacgatctgctggagtccagggacaaggatcgccagcaggagcacaggaactggcagaccatcgagggcatcaaggagctgaagcagggctacctgtctcaggccgtgcaccgcatcgccgagctgatggtggcctataaggccgtggtggccctggaggacctgaacatgggcttcaagcggggcagacagaaggtggagagcagcgtgtaccagcagtttgagaagcagctgatcgacaagctgaattatctggtggataagaagaagcggcccgaggacatcggaggcctgctgagagcctaccagttcaccgcccctttcaagagctttaaggagatgggcaagcagaacggctttctgttctatatccctgcctggaacacatccaatatcgacccaaccacaggcttcgtgaacctgtttcacgtgcagtacgagaatgtggataaggccaagagcttctttcagaagttcgacagcatctcctacaaccctaagaaggattggtttgagttcgcctttgactataagaacttcaccaagaaggccgagggctctaggagcatgtggattctgtgcacccacggctcccggatcaagaacttcagaaattctcagaagaatggccagtgggatagcgaggagtttgccctgaccgaggccttcaagtccctgtttgtgcggtacgagatcgattataccgccgacctgaaaaccgccatcgtggacgagaagcagaaggatttctttgtggacctgctgaagctgttcaagctgaccgtgcagatgagaaactcctggaaggagaaggacctggattacctgatctctccagtggccggcgccgatggcaggttctttgacacacgcgagggcaataagagcctgcccaaggacgcagatgcaaacggagcctataatatcgccctgaagggcctgtgggcactgaggcagatcagacagacctccgagggcggcaagctgaagctggccatctctaacaaggagtggctgcagtttgtgcaggagagatcctacgagaaggacaaaaggccggcggccacgaaaaaggccggccaggcaaaaaagaaaaagggatcctacccatacgatgttccagattacgcttatccctacgacgtgcctgattatgcatacccatatgatgtccccgactatgcctaagaattc

SEQ ID NO: 228 - DNA, 4113 bp, Artificial Sequence
  Description of Artificial Sequence: Synthetic polynucleotide
atggagaactatcaggagttcaccaacctgtttcagctgaataagacactgagattcgagctgaagcccatcggcaagacctgcgagctgctggaggagggcaagatcttcgccagcggctcctttctggagaaggacaaggtgagggccgataacgtgagctacgtgaagaaggagatcgacaagaagcacaagatctttatcgaggagacactgagctccttctctatcagcaacgatctgctgaagcagtactttgactgctataatgagctgaaggccttcaagaaggactgtaagagcgatgaggaggaggtgaagaaaaccgccctgcgcaacaagtgtacctccatccagagggccatgcgcgaggccatctctcaggcctttctgaagagcccccagaagaagctgctggccatcaagaacctgatcgagaacgtgttcaaggccgacgagaatgtgcagcacttctccgagtttaccagctatttctccggctttgagacaaacagagagaatttctactctgacgaggagaagtccacatctatcgcctataggctggtgcacgataacctgcctatcttcatcaagaacatctacatcttcgagaagctgaaggagcagttcgacgccaagaccctgagcgagatcttcgagaactacaagctgtatgtggccggctctagcctggatgaggtgttctccctggagtactttaacaataccctgacacagaagggcatcgacaactataatgccgtgatcggcaagatcgtgaaggaggataagcaggagatccagggcctgaacgagcacatcaacctgtataatcagaagcacaaggaccggagactgcccttctttatctccctgaagaagcagatcctgtccgatcgggaggccctgtcttggctgcctgacatgttcaagaatgattctgaagtgatcaaggccctgaagggcttctacatcgaggacggctttgagaacaatgtgctgacacctctggccaccctgctgtcctctctggataagtacaacctgaatggcatctttatccgcaacaatgaggccctgagctccctgtcccagaacgtgtatcggaatttttctatcgacgaggccatcgatgccaacgccgagctgcagaccttcaacaattacgagctgatcgccaatgccctgcgcgccaagatcaagaaggagacaaagcagggccggaagtctttcgagaagtacgaggagtatatcgataagaaggtgaaggccatcgacagcctgtccatccaggagatcaacgagctggtggagaattacgtgagcgagtttaactctaatagcggcaacatgccaagaaaggtggaggactacttcagcctgatgaggaagggcgacttcggctccaacgatctgatcgaaaatatcaagaccaagctgagcgccgcagagaagctgctgggcacaaagtaccaggagacagccaaggacatcttcaagaaggatgagaactccaagctgatcaaggagctgctggacgccaccaagcagttccagcactttatcaagccactgctgggcacaggcgaggaggcagatcgggacctggtgttctacggcgattttctgcccctgtatgagaagtttgaggagctgaccctgctgtataacaaggtgcggaatagactgacacagaagccctattccaaggacaagatccgcctgtgcttcaacaagcctaagctgatgacaggctgggtggattccaagaccgagaagtctgacaacggcacacagtacggcggctatctgtttcggaagaagaatgagatcggcgagtacgattattttctgggcatctctagcaaggcccagctgttcagaaagaacgaggccgtgatcggcgactacgagaggctggattactatcagccaaaggccaataccatctacggctctgcctatgagggcgagaacagctacaaggaggacaagaagcggctgaacaaagtgatcatcgcctatatcgagcagatcaagcagacaaacatcaagaagtctatcatcgagtccatctctaagtatcctaatatcagcgacgatgacaaggtgaccccatcctctctgctggagaagatcaagaaggtgtctatcgacagctacaacggcatcctgtccttcaagtcttttcagagcgtgaacaaggaagtgatcgataacctgctgaaaaccatcagccccctgaagaacaaggccgagtttctggacctgatcaataaggattatcagatcttcaccgaggtgcaggccgtgatcgacgagatctgcaagcagaaaaccttcatctactttccaatctccaacgtggagctggagaaggagatgggcgataaggacaagcccctgtgcctgttccagatcagcaataaggatctgtccttcgccaagacctttagcgccaacctgcggaagaagagaggcgccgagaatctgcacacaatgctgtttaaggccctgatggagggcaaccaggataatctggacctgggctctggcgccatcttctacagagccaagagcctggacggcaacaagcccacacaccctgccaatgaggccatcaagtgtaggaacgtggccaataaggataaggtgtccctgttcacctacgacatctataagaacaggcgctacatggagaataagttcctgtttcacctgagcatcgtgcagaactataaggccgccaatgactccgcccagctgaacagctccgccaccgagtatatcagaaaggccgatgacctgcacatcatcggcatcgataggggcgagcgcaatctgctgtactattccgtgatcgatatgaagggcaacatcgtggagcaggactctctgaatatcatcaggaacaatgacctggagacagattaccacgacctgctggataagagggagaaggagcgcaaggccaaccggcagaattgggaggccgtggagggcatcaaggacctgaagaagggctacctgagccaggccgtgcaccagatcgcccagctgatgctgaagtataacgccatcatcgccctggaggatctgggccagatgtttgtgacccgcggccagaagatcgagaaggccgtgtaccagcagttcgagaagagcctggtggataagctgtcctacctggtggacaagaagcggccttataatgagctgggcggcatcctgaaggcctaccagctggcctctagcatcaccaagaacaattctgacaagcagaacggcttcctgttttatgtgccagcctggaatacaagcaagatcgatcccgtgaccggctttacagacctgctgcggcccaaggccatgaccatcaaggaggcccaggacttctttggcgccttcgataacatctcttacaatgacaagggctatttcgagtttgagacaaactacgacaagtttaagatcagaatgaagagcgcccagaccaggtggacaatctgcaccttcggcaatcggatcaagagaaagaaggataagaactactggaattatgaggaggtggagctgaccgaggagttcaagaagctgtttaaggacagcaacatcgattacgagaactgtaatctgaaggaggagatccagaacaaggacaatcgcaagttctttgatgacctgatcaagctgctgcagctgacactgcagatgcggaactccgatgacaagggcaatgattatatcatctctcctgtggccaacgccgagggccagttctttgactcccgcaatggcgataagaagctgccactggatgcagacgcaaacggagcctacaatatcgcccgcaagggcctgtggaacatccggcagatcaagcagaccaagaacgacaagaagctgaatctgagcatctcctctacagagtggctggatttcgtgcgggagaagccttacctgaagaaaaggccggcggccacgaaaaaggccggccaggcaaaaaagaaaaagggatcctacccatacgatgttccagattacgcttatccctacgacgtgcctgattatgcatacccatatgatgtccccgactatgcctaagaattc

SEQ ID NO: 229 - DNA, 3882 bp, Artificial Sequence
  Description of Artificial Sequence: Synthetic polynucleotide
atgaaaacccagcacttctttgaggacttcacaagcctgtactctctgagcaagaccatccggtttgagctgaagccaatcggcaagaccctggagaacatcaagaagaatggcctgatccggagagatgagcagagactggacgattacgagaagctgaagaaagtgatcgacgagtatcacgaggatttcatcgccaacatcctgagctccttttccttctctgaggagatcctgcagtcctacatccagaatctgagcgagtccgaggccagggccaagatcgagaaaaccatgcgcgacacactggccaaggccttctctgaggatgagaggtacaagagcatctttaagaaggagctggtgaagaaggacatccccgtgtggtgccctgcctataagagcctgtgcaagaagttcgataactttaccacatctctggtgcccttccacgagaacaggaagaacctgtataccagcaatgagatcacagcctctatcccttatcgcatcgtgcacgtgaacctgccaaagtttatccagaatatcgaggccctgtgcgagctgcagaagaagatgggcgccgacctgtacctggagatgatggagaacctgcgcaacgtgtggcccagcttcgtgaaaaccccagacgacctgtgcaacctgaaaacctataatcacctgatggtgcagtctagcatcagcgagtacaacaggtttgtgggcggctattccaccgaggacggcacaaagcaccagggcatcaacgagtggatcaatatctacagacagaggaataaggagatgcgcctgcctggcctggtgttcctgcacaagcagatcctggccaaggtggactcctctagcttcatcagcgatacactggagaacgacgatcaggtgttttgcgtgctgagacagttcaggaagctgttttggaataccgtgtcctctaaggaggacgatgccgcctccctgaaggacctgttctgtggcctgtctggctatgaccctgaggccatctacgtgagcgatgcccacctggccacaatctccaagaacatctttgacagatggaattacatctccgatgccatcaggcgcaagaccgaggtgctgatgccacggaagaaggagagcgtggagagatatgccgagaagatctccaagcagatcaagaagagacagtcttacagcctggccgagctggacgatctgctggcccactatagcgaggagtccctgcccgcaggcttctctctgctgagctactttacatctctgggcggccagaagtatctggtgagcgacggcgaagtgatcctgtacgaggagggcagcaacatctgggacgaggtgctgatcgccttcagggatctgcaggtcatcctggacaaggacttcaccgagaagaagctgggcaaggatgaggaggccgtgtctgtgatcaagaaggccctggacagcgccctgcgcctgcggaagttctttgatctgctgtccggcacaggcgcagagatcaggagagacagctccttctatgccctgtataccgaccggatggataagctgaagggcctgctgaagatgtatgataaggtgagaaactacctgaccaagaagccttattccatcgagaagttcaagctgcactttgacaacccatccctgctgtctggctgggataagaataaggagctgaacaatctgtctgtgatcttccggcagaacggctactattacctgggcatcatgacacccaagggcaagaatctgttcaagaccctgcctaagctgggcgccgaggagatgttttatgagaagatggagtacaagcagatcgccgagcctatgctgatgctgccaaaggtgttctttcccaagaaaaccaagccagccttcgccccagaccagagcgtggtggatatctacaacaagaaaaccttcaagacaggccagaagggctttaataagaaggacctgtaccggctgatcgacttctacaaggaggccctgacagtgcacgagtggaagctgtttaacttctccttttctccaaccgagcagtatcggaatatcggcgagttctttgacgaggtgagagagcaggcctacaaggtgtccatggtgaacgtgcccgcctcttatatcgacgaggccgtggagaacggcaagctgtatctgttccagatctacaataaggacttcagcccctactccaagggcatccctaacctgcacacactgtattggaaggccctgttcagcgagcagaatcagagccgggtgtataagctgtgcggaggaggagagctgttttatagaaaggccagcctgcacatgcaggacaccacagtgcaccccaagggcatctctatccacaagaagaacctgaataagaagggcgagacaagcctgttcaactacgacctggtgaaggataagaggtttaccgaggacaagttctttttccacgtgcctatctctatcaactacaagaataagaagatcaccaacgtgaatcagatggtgcgcgattatatcgcccagaacgacgatctgcagatcatcggcatcgaccgcggcgagcggaatctgctgtatatcagccggatcgatacaaggggcaacctgctggagcagttcagcctgaatgtgatcgagtccgacaagggcgatctgagaaccgactatcagaagatcctgggcgatcgcgagcaggagcggctgaggcgccggcaggagtggaagtctatcgagagcatcaaggacctgaaggatggctacatgagccaggtggtgcacaagatctgtaacatggtggtggagcacaaggccatcgtggtgctggagaacctgaatctgagcttcatgaagggcaggaagaaggtggagaagtccgtgtacgagaagtttgagcgcatgctggtggacaagctgaactatctggtggtggataagaagaacctgtccaatgagccaggaggcctgtatgcagcataccagctgaccaatccactgttctcttttgaggagctgcacagatacccccagagcggcatcctgtttttcgtggacccatggaacacctctctgacagatcccagcacaggcttcgtgaatctgctgggcagaatcaactacaccaatgtgggcgacgcccgcaagtttttcgatcggtttaacgccatcagatatgacggcaagggcaatatcctgttcgacctggatctgtccagatttgatgtgagggtggagacacagaggaagctgtggacactgaccacattcggctctcgcatcgccaaatccaagaagtctggcaagtggatggtggagcggatcgagaacctgagcctgtgctttctggagctgttcgagcagtttaatatcggctacagagtggagaaggacctgaagaaggccatcctgagccaggataggaaggagttctatgtgcgcctgatctacctgtttaacctgatgatgcagatccggaacagcgacggcgaggaggattatatcctgtctcccgccctgaacgagaagaatctgcagttcgacagcaggctgatcgaggccaaggatctgcctgtggacgcagatgcaaacggagcatacaatgtggcccgcaagggcctgatggtggtgcagagaatcaagaggggcgaccacgagtccatccacaggatcggaagggcacagtggctgagatatgtgcaggagggcatcgtggagaaaaggccggcggccacgaaaaaggccggccaggcaaaaaagaaaaagggatcctacccatacgatgttccagattacgcttatccctacgacgtgcctgattatgcatacccatatgatgtccccgactatgcctaagaattc

SEQ ID NO: 230 - protein, 1345 aa, Artificial Sequence
  Description of Artificial Sequence: Synthetic polypeptide
MSIYQEFVNKYSLSKTLRFELIPQGKTLENIKARGLILDDEKRAKDYKKAKQIIDKYHQFFIEEILSSVCISEDLLQNYSDVYFKLKKSDDDNLQKDFKSAKDTIKKQISEYIKDSEKFKNLFNQNLIDAKKGQESDLILWLKQSKDNGIELFKANSDITDIDEALEIIKSFKGWTTYFKGFHENRKNVYSSNDIPTSIIYRIVDDNLPKFLENKAKYESLKDKAPEAINYEQIKKDLAEELTFDIDYKTSEVNQRVFSLDEVFEIANFNNYLNQSGITKFNTIIGGKFVNGENTKRKGINEYINLYSQQINDKTLKKYKMSVLFKQILSDTESKSFVIDKLEDDSDVVTTMQSFYEQIAAFKTVEEKSIKETLSLLFDDLKAQKLDLSKIYFKNDKSLTDLSQQVFDDYSVIGTAVLEYITQQIAPKNLDNPSKKEQELIAKKTEKAKYLSLETIKLALEEFNKHRDIDKQCRFEEILANFAAIPMIFDEIAQNKDNLAQISIKYQNQGKKDLLQASAEDDVKAIKDLLDQTNNLLHKLKIFHISQSEDKANILDKDEHFYLVFEECYFELANIVPLYNKIRNYITQKPYSDEKFKLNFENSTLANGWDKNKEPDNTAILFIKDDKYYLGVMNKKNNKIFDDKAIKENKGEGYKKIVYKLLPGANKMLPKVFFSAKSIKFYNPSEDILRIRNHSTHTKNGSPQKGYEKFEFNIEDCRKFIDFYKQSISKHPEWKDFGFRFSDTQRYNSIDEFYREVENQGYKLTFENISESYIDSVVNQGKLYLFQIYNKDFSAYSKGRPNLHTLYWKALFDERNLQDVVYKLNGEAELFYRKQSIPKKITHPAKEAIANKNKDNPKKESVFEYDLIKDKRFTEDKFFFHCPITINFKSSGANKFNDEINLLLKEKANDVHILSIDRGERHLAYYTLVDGKGNIIKQDTFNIIGNDRMKTNYHDKLAAIEKDRDSARKDWKKINNIKEMKEGYLSQVVHEIAKLVIEYNAIVVFEDLNFGFKRGRFKVEKQVYQKLEKMLIEKLNYLVFKDNEFDKTGGVLRAYQLTAPFETFKKMGKQTGIIYYVPAGFTSKICPVTGFVNQLYPKYESVSKSQEFFSKFDKICYNLDKGYFEFSFDYKNFGDKAAKGKWTIASFGSRLINFRNSDKNHNWDTREVYPTKELEKLLKDYSIEYGHGECIKAAICGESDKKFFAKLTSVLNTILQMRNSKTGTELDYLISPVADVNGNFFDSRQAPKNMPQDADANGAYHIGLKGLMLLGRIKNNQEGKKLNLVIKNEEYFEFVQNRNNKRPAATKKAGQAKKKKGSYPYDVPDYAYPYDVPDYAYPYDVPDYA

SEQ ID NO: 231 - protein, 1278 aa, Artificial Sequence
  Description of Artificial Sequence: Synthetic polypeptide
MDYGNGQFERRAPLTKTITLRLKPIGETRETIREQKLLEQDAAFRKLVETVTPIVDDCIRKIADNALCHFGTEYDFSCLGNAISKNDSKAIKKETEKVEKLLAKVLTENLPDGLRKVNDINSAAFIQDTLTSFVQDDADKRVLIQELKGKTVLMQRFLTTRITALTVWLPDRVFENFNIFIENAEKMRILLDSPLNEKIMKFDPDAEQYASLEFYGQCLSQKDIDSYNLIISGIYADDEVKNPGINEIVKEYNQQIRGDKDESPLPKLKKLHKQILMPVEKAFFVRVLSNDSDARSILEKILKDTEMLPSKIIEAMKEADAGDIAVYGSRLHELSHVIYGDHGKLSQIIYDKESKRISELMETLSPKERKESKKRLEGLEEHIRKSTYTFDELNRYAEKNVMAAYIAAVEESCAEIMRKEKDLRTLLSKEDVKIRGNRHNTLIVKNYFNAWTVFRNLIRILRRKSEAEIDSDFYDVLDDSVEVLSLTYKGENLCRSYITKKIGSDLKPEIATYGSALRPNSRWWSPGEKFNVKFHTIVRRDGRLYYFILPKGAKPVELEDMDGDIECLQMRKIPNPTIFLPKLVFKDPEAFFRDNPEADEFVFLSGMKAPVTITRETYEAYRYKLYTVGKLRDGEVSEEEYKRALLQVLTAYKEFLENRMIYADLNFGFKDLEEYKDSSEFIKQVETHNTFMCWAKVSSSQLDDLVKSGNGLLFEIWSERLESYYKYGNEKVLRGYEGVLLSILKDENLVSMRTLLNSRPMLVYRPKESSKPMVVHRDGSRVVDRFDKDGKYIPPEVHDELYRFFNNLLIKEKLGEKARKILDNKKVKVKVLESERVKWSKFYDEQFAVTFSVKKNADCLDTTKDLNAEVMEQYSESNRLILIRNTTDILYYLVLDKNGKVLKQRSLNIINDGARDVDWKERFRQVTKDRNEGYNEWDYSRTSNDLKEVYLNYALKEIAEAVIEYNAILIIEKMSNAFKDKYSFLDDVTFKGFETKLLAKLSDLHFRGIKDGEPCSFTNPLQLCQNDSNKILQDGVIFMVPNSMTRSLDPDTGFIFAINDHNIRTKKAKLNFLSKFDQLKVSSEGCLIMKYSGDSLPTHNTDNRVWNCCCNHPITNYDRETKKVEFIEEPVEELSRVLEENGIETDTELNKLNERENVPGKVVDAIYSLVLNYLRGTVSGVAGQRAVYYSPVTGKKYDISFIQAMNLNRKCDYYRIGSKERGEWTDFVAQLINKRPAATKKAGQAKKKKGSYPYDVPDYAYPYDVPDYAYPYDVPDYA

SEQ ID NO: 232 - protein, 1286 aa, Artificial Sequence
  Description of Artificial Sequence: Synthetic polypeptide
MLLYENYTKRNQITKSLRLELRPQGKTLRNIKELNLLEQDKAIYALLERLKPVIDEGIKDIARDTLKNCELSFEKLYEHFLSGDKKAYAKESERLKKEIVKTLIKNLPEGIGKISEINSAKYLNGVLYDFIDKTHKDSEEKQNILSDILETKGYLALFSKFLTSRITTLEQSMPKRVIENFEIYAANIPKMQDALERGAVSFAIEYESICSVDYYNQILSQEDIDSYNRLISGIMDEDGAKEKGINQTISEKNIKIKSEHLEEKPFRILKQLHKQILEEREKAFTIDHIDSDEEVVQVTKEAFEQTKEQWENIKKINGFYAKDPGDITLFIVVGPNQTHVLSQLIYGEHDRIRLLLEEYEKNTLEVLPRRTKSEKARYDKFVNAVPKKVAKESHTFDGLQKMTGDDRLFILYRDELARNYMRIKEAYGTFERDILKSRRGIKGNRDVQESLVSFYDELTKFRSALRIINSGNDEKADPIFYNTFDGIFEKANRTYKAENLCRNYVTKSPADDARIMASCLGTPARLRTHWWNGEENFAINDVAMIRRGDEYYYFVLTPDVKPVDLKTKDETDAQIFVQRKGAKSFLGLPKALFKCILEPYFESPEHKNDKNCVIEEYVSKPLTIDRRAYDIFKNGTFKKTNIGIDGLTEEKFKDDCRYLIDVYKEFIAVYTRYSCFNMSGLKRADEYNDIGEFFSDVDTRLCTMEWIPVSFERINDMVDKKEGLLFLVRSMFLYNRPRKPYERTFIQLFSDSNMEHTSMLLNSRAMIQYRAASLPRRVTHKKGSILVALRDSNGEHIPMHIREAIYKMKNNFDISSEDFIMAKAYLAEHDVAIKKANEDIIRNRRYTEDKFFLSLSYTKNADISARTLDYINDKVEEDTQDSRMAVIVTRNLKDLTYVAVVDEKNNVLEEKSLNEIDGVNYRELLKERTKIKYHDKTRLWQYDVSSKGLKEAYVELAVTQISKLATKYNAVVVVESMSSTFKDKFSFLDEQIFKAFEARLCARMSDLSFNTIKEGEAGSISNPIQVSNNNGNSYQDGVIYFLNNAYTRTLCPDTGFVDVFDKTRLITMQSKRQFFAKMKDIRIDDGEMLFTFNLEEYPTKRLLDRKEWTVKIAGDGSYFDKDKGEYVYVNDIVREQIIPALLEDKAVFDGNMAEKFLDKTAISGKSVELIYKWFANALYGIITKKDGEKIYRSPITGTEIDVSKNTTYNFGKKFMFKQEYRGDGDFLDAFLNYMQAQDIAVKRPAATKKAGQAKKKKGSYPYDVPDYAYPYDVPDYAYPYDVPDYA

SEQ ID NO: 233 - protein, 1522 aa, Artificial Sequence
  Description of Artificial Sequence: Synthetic polypeptide
MSNFFKNFTNLYELSKTLRFELKPVGDTLTNMKDHLEYDEKLQTFLKDQNIDDAYQALKPQFDEIHEEFITDSLESKKAKEIDFSEYLDLFQEKKELNDSEKKLRNKIGETFNKAGEKWKKEKYPQYEWKKGSKIANGADILSCQDMLQFIKYKNPEDEKIKNYIDDTLKGFFTYFGGFNQNRANYYETKKEASTAVATRIVHENLPKFCDNVIQFKHIIKRKKDGTVEKTERKTEYLNAYQYLKNNNKITQIKDAETEKMIESTPIAEKIFDVYYFSSCLSQKQIEEYNRIIGHYNLLINLYNQAKRSEGKHLSANEKKYKDLPKFKTLYKQIGCGKKKDLFYTIKCDTEEEANKSRNEGKESHSVEEIINKAQEAINKYFKSNNDCENINTVPDFINYILTKENYEGVYWSKAAMNTISDKYFANYHDLQDRLKEAKVFQKADKKSEDDIKIPEAIELSGLFGVLDSLADWQTTLFKSSILSNEDKLKIITDSQTPSEALLKMIFNDIEKNMESFLKETNDIITLKKYKGNKEGTEKIKQWFDYTLAINRMLKYFLVKENKIKGNSLDTNISEALKTLIYSDDAEWFKWYDALRNYLTQKPQDEAKENKLKLNFDNPSLAGGWDVNKECSNFCVILKDKNEKKYLAIMKKGENTLFQKEWTEGRGKNLTKKSNPLFEINNCEILSKMEYDFWADVSKMIPKCSTQLKAVVNHFKQSDNEFIFPIGYKVTSGEKFREECKISKQDFELNNKVFNKNELSVTAMRYDLSSTQEKQYIKAFQKEYWELLFKQEKRDTKLTNNEIFNEWINFCNKKYSELLSWERKYKDALTNWINFCKYFLSKYPKTTLFNYSFKESENYNSLDEFYRDVDICSYKLNINTTINKSILDRLVEEGKLYLFEIKNQDSNDGKSIGHKNNLHTIYWNAIFENFDNRPKLNGEAEIFYRKAISKDKLGIVKGKKTKNGTEIIKNYRFSKEKFILHVPITLNFCSNNEYVNDIVNTKFYNFSNLHFLGIDRGEKHLAYYSLVNKNGEIVDQGTLNLPFTDKDGNQRSIKKEKYFYNKQEDKWEAKEVDCWNYNDLLDAMASNRDMARKNWQRIGTIKEAKNGYVSLVIRKIADLAVNNERPAFIVLEDLNTGFKRSRQKIDKSVYQKFELALAKKLNFLVDKNAKRDEIGSPTKALQLTPPVNNYGDIENKKQAGIMLYTRANYTSQTDPATGWRKTIYLKAGPEETTYKKDGKIKNKSVKDQIIETFTDIGFDGKDYYFEYDKGEFVDEKTGEIKPKKWRLYSGENGKSLDRFRGEREKDKYEWKIDKIDIVKILDDLFVNFDKNISLLKQLKEGVELTRNNEHGTGESLRFAINLIQQIRNTGNNERDNDFILSPVRDENGKHFDSREYWDKETKGEKISMPSSGDANGAFNIARKGIIMNAHILANSDSKDLSLFVSDEEWDLHLNNKTEWKKQLNIFSSRKAMAKRKKKRPAATKKAGQAKKKKGSYPYDVPDYAYPYDVPDYAYPYDVPDYA

SEQ ID NO: 234 - protein, 1397 aa, Artificial Sequence
  Description of Artificial Sequence: Synthetic polypeptide
MENIFDQFIGKYSLSKTLRFELKPVGKTEDFLKINKVFEKDQTIDDSYNQAKFYFDSLHQKFIDAALASDKTSELSFQNFADVLEKQNKIILDKKREMGALRKRDKNAVGIDRLQKEINDAEDIIQKEKEKIYKDVRTLFDNEAESWKTYYQEREVDGKKITFSKADLKQKGADFLTAAGILKVLKYEFPEEKEKEFQAKNQPSLFVEEKENPGQKRYIFDSFDKFAGYLTKFQQTKKNLYAADGTSTAVATRIADNFIIFHQNTKVFRDKYKNNHTDLGFDEENIFEIERYKNCLLQREIEHIKNENSYNKIIGRINKKIKEYRDQKAKDTKLTKSDFPFFKNLDKQILGEVEKEKQLIEKTREKTEEDVLIERFKEFIENNEERFTAAKKLMNAFCNGEFESEYEGIYLKNKAINTISRRWFVSDRDFELKLPQQKSKNKSEKNEPKVKKFISIAEIKNAVEELDGDIFKAVFYDKKIIAQGGSKLEQFLVIWKYEFEYLFRDIERENGEKLLGYDSCLKIAKQLGIFPQEKEAREKATAVIKNYADAGLGIFQMMKYFSLDDKDRKNTPGQLSTNFYAEYDGYYKDFEFIKYYNEFRNFITKKPFDEDKIKLNFENGALLKGWDENKEYDFMGVILKKEGRLYLGIMHKNHRKLFQSMGNAKGDNANRYQKMIYKQIADASKDVPRLLLTSKKAMEKFKPSQEILRIKKEKTFKRESKNFSLRDLHALIEYYRNCIPQYSNWSFYDFQFQDTGKYQNIKEFTDDVQKYGYKISFRDIDDEYINQALNEGKMYLFEVVNKDIYNTKNGSKNLHTLYFEHILSAENLNDPVFKLSGMAEIFQRQPSVNEREKITTQKNQCILDKGDRAYKYRRYTEKKIMFHMSLVLNTGKGEIKQVQFNKIINQRISSSDNEMRVNVIGIDRGEKNLLYYSVVKQNGEIIEQASLNEINGVNYRDKLIEREKERLKNRQSWKPVVKIKDLKKGYISHVIHKICQLIEKYSAIVVLEDLNMRFKQIRGGIERSVYQQFEKALIDKLGYLVFKDNRDLRAPGGVLNGYQLSAPFVSFEKMRKQTGILFYTQAEYTSKTDPITGFRKNVYISNSASLDKIKEAVKKFDAIGWDGKEQSYFFKYNPYNLADEKYKNSTVSKEWAIFASAPRIRRQKGEDGYWKYDRVKVNEEFEKLLKVWNFVNPKATDIKQEIIKKEKAGDLQGEKELDGRLRNFWHSFIYLFNLVLELRNSFSLQIKIKAGEVIAVDEGVDFIASPVKPFFTTPNPYIPSNLCWLAVENADANGAYNIARKGVMILKKIREHAKKDPEFKKLPNLFISNAEWDEAARDWGKYAGTTALNLDHKRPAATKKAGQAKKKKGSYPYDVPDYAYPYDVPDYAYPYDVPDYA

SEQ ID NO: 235 - protein, 1295 aa, Artificial Sequence
  Description of Artificial Sequence: Synthetic polypeptide
MQTLFENFTNQYPVSKTLRFELIPQGKTKDFIEQKGLLKKDEDRAEKYKKVKNIIDEYHKDFIEKSLNGLKLDGLEKYKTLYLKQEKDDKDKKAFDKEKENLRKQIANAFRNNEKFKTLFAKELIKNDLMSFACEEDKKNVKEFEAFTTYFTGFHQNRANMYVADEKRTAIASRLIHENLPKFIDNIKIFEKMKKEAPELLSPFNQTLKDMKDVIKGTTLEEIFSLDYFNKTLTQSGIDIYNSVIGGRTPEEGKTKIKGLNEYINTDFNQKQTDKKKRQPKFKQLYKQILSDRQSLSFIAEAFKNDTEILEAIEKFYVNELLHFSNEGKSTNVLDAIKNAVSNLESFNLTKMYFRSGASLTDVSRKVFGEWSIINRALDNYYATTYPIKPREKSEKYEERKEKWLKQDFNVSLIQTAIDEYDNETVKGKNSGKVIADYFAKFCDDKETDLIQKVNEGYIAVKDLLNTPCPENEKLGSNKDQVKQIKAFMDSIMDIMHFVRPLSLKDTDKEKDETFYSLFTPLYDHLTQTIALYNKVRNYLTQKPYSTEKIKLNFENSTLLGGWDLNKETDNTAIILRKDNLYYLGIMDKRHNRIFRNVPKADKKDFCYEKMVYKLLPGANKMLPKVFFSQSRIQEFTPSAKLLENYANETHKKGDNFNLNHCHKLIDFFKDSINKHEDWKNFDFRFSATSTYADLSGFYHEVEHQGYKISFQSVADSFIDDLVNEGKLYLFQIYNKDFSPFSKGKPNLHTLYWKMLFDENNLKDVVYKLNGEAEVFYRKKSIAEKNTTIHKANESIINKNPDNPKATSTFNYDIVKDKRYTIDKFQFHIPITMNFKAEGIFNMNQRVNQFLKANPDINIIGIDRGERHLLYYALINQKGKILKQDTLNVIANEKQKVDYHNLLDKKEGDRATARQEWGVIETIKELKEGYLSQVIHKLTDLMIENNAIIVMEDLNFGFKRGRQKVEKQVYQKFEKMLIDKLNYLVDKNKKANELGGLLNAFQLANKFESFQKMGKQNGFIFYVPAWNTSKTDPATGFIDFLKPRYENLNQAKDFFEKFDSIRLNSKADYFEFAFDFKNFTEKADGGRTKWTVCTTNEDRYAWNRALNNNRGSQEKYDITAELKSLFDGKVDYKSGKDLKQQIASQESADFFKALMKNLSITLSLRHNNGEKGDNEQDYILSPVADSKGRFFDSRKADDDMPKNADANGAYHIALKGLWCLEQISKTDDLKKVKLAISNKEWLEFVQTLKGKRPAATKKAGQAKKKKGSYPYDVPDYAYPYDVPDYAYPYDVPDYA

SEQ ID NO: 236 - protein, 1352 aa, Artificial Sequence
  Description of Artificial Sequence: Synthetic polypeptide
MTQFEGFTNLYQVSKTLRFELIPQGKTLKHIQEQGFIEEDKARNDHYKELKPIIDRIYKTYADQCLQLVQLDWENLSAAIDSYRKEKTEETRNALIEEQATYRNAIHDYFIGRTDNLTDAINKRHAEIYKGLFKAELFNGKVLKQLGTVTTTEHENALLRSFDKFTTYFSGFYENRKNVFSAEDISTAIPHRIVQDNFPKFKENCHIFTRLITAVPSLREHFENVKKAIGIFVSTSIEEVFSFPFYNQLLTQTQIDLYNQLLGGISREAGTEKIKGLNEVLNLAIQKNDETAHIIASLPHRFIPLFKQILSDRNTLSFILEEFKSDEEVIQSFCKYKTLLRNENVLETAEALFNELNSIDLTHIFISHKKLETISSALCDHWDTLRNALYERRISELTGKITKSAKEKVQRSLKHEDINLQEIISAAGKELSEAFKQKTSEILSHAHAALDQPLPTTLKKQEEKEILKSQLDSLLGLYHLLDWFAVDESNEVDPEFSARLTGIKLEMEPSLSFYNKARNYATKKPYSVEKFKLNFQMPTLASGWDVNKEKNNGAILFVKNGLYYLGIMPKQKGRYKALSFEPTEKTSEGFDKMYYDYFPDAAKMIPKCSTQLKAVTAHFQTHTTPILLSNNFIEPLEITKEIYDLNNPEKEPKKFQTAYAKKTGDQKGYREALCKWIDFTRDFLSKYTKTTSIDLSSLRPSSQYKDLGEYYAELNPLLYHISFQRIAEKEIMDAVETGKLYLFQIYNKDFAKGHHGKPNLHTLYWTGLFSPENLAKTSIKLNGQAELFYRPKSRMKRMAHRLGEKMLNKKLKDQKTPIPDTLYQELYDYVNHRLSHDLSDEARALLPNVITKEVSHEIIKDRRFTSDKFFFHVPITLNYQAANSPSKFNQRVNAYLKEHPETPIIGIDRGERNLIYITVIDSTGKILEQRSLNTIQQFDYQKKLDNREKERVAARQAWSVVGTIKDLKQGYLSQVIHEIVDLMIHYQAVVVLENLNFGFKSKRTGIAEKAVYQQFEKMLIDKLNCLVLKDYPAEKVGGVLNPYQLTDQFTSFAKMGTQSGFLFYVPAPYTSKIDPLTGFVDPFVWKTIKNHESRKHFLEGFDFLHYDVKTGDFILHFKMNRNLSFQRGLPGFMPAWDIVFEKNETQFDAKGTPFIAGKRIVPVIENHRFTGRYRDLYPANELIALLEEKGIVFRDGSNILPKLLENDDSHAIDTMVALIRSVLQMRNSNAATGEDYINSPVRDLNGVCFDSRFQNPEWPMDADANGAYHIALKGQLLLNHLKESKDLKLQNGISNQDWLAYIQELRNKRPAATKKAGQAKKKKGSYPYDVPDYAYPYDVPDYAYPYDVPDYA

SEQ ID NO: 237 - protein, 1251 aa, Artificial Sequence
  Description of Artificial Sequence: Synthetic polypeptide
MYYESLTKQYPVSKTIRNELIPIGKTLDNIRQNNILESDVKRKQNYEHVKGILDEYHKQLINEALDNCTLPSLKIAAEIYLKNQKEVSDREDFNKTQDLLRKEVVEKLKAHENFTKIGKKDILDLLEKLPSISEDDYNALESFRNFYTYFTSYNKVRENLYSDKEKSSTVAYRLINENFPKFLDNVKSYRFVKTAGILADGLGEEEQDSLFIVETFNKTLTQDGIDTYNSQVGKINSSINLYNQKNQKANGFRKIPKMKMLYKQILSDREESFIDEFQSDEVLIDNVESYGSVLIESLKSSKVSAFFDALRESKGKNVYVKNDLAKTAMSNIVFENWRTFDDLLNQEYDLANENKKKDDKYFEKRQKELKKNKSYSLEHLCNLSEDSCNLIENYIHQISDDIENIIINNETFLRIVINEHDRSRKLAKNRKAVKAIKDFLDSIKVLERELKLINSSGQELEKDLIVYSAHEELLVELKQVDSLYNMTRNYLTKKPFSTEKVKLNFNRSTLLNGWDRNKETDNLGVLLLKDGKYYLGIMNTSANKAFVNPPVAKTEKVFKKVDYKLLPVPNQMLPKVFFAKSNIDFYNPSSEIYSNYKKGTHKKGNMFSLEDCHNLIDFFKESISKHEDWSKFGFKFSDTASYNDISEFYREVEKQGYKLTYTDIDETYINDLIERNELYLFQIYNKDFSMYSKGKLNLHTLYFMMLFDQRNIDDVVYKLNGEAEVFYRPASISEDELIIHKAGEEIKNKNPNRARTKETSTFSYDIVKDKRYSKDKFTLHIPITMNFGVDEVKRFNDAVNSAIRIDENVNVIGIDRGERNLLYVVVIDSKGNILEQISLNSIINKEYDIETDYHALLDEREGGRDKARKDWNTVENIRDLKAGYLSQVVNVVAKLVLKYNAIICLEDLNFGFKRGRQKVEKQVYQKFEKMLIDKLNYLVIDKSREQTSPKELGGALNALQLTSKFKSFKELGKQSGVIYYVPAYLTSKIDPTTGFANLFYMKCENVEKSKRFFDGFDFIRFNALENVFEFGFDYRSFTQRACGINSKWTVCTNGERIIKYRNPDKNNMFDEKVVVVTDEMKNLFEQYKIPYEDGRNVKDMIISNEEAEFYRRLYRLLQQTLQMRNSTSDGTRDYIISPVKNKREAYFNSELSDGSVPKDADANGAYNIARKGLWVLEQIRQKSEGEKINLAMTNAEWLEYAQTHLLKRPAATKKAGQAKKKKGSYPYDVPDYAYPYDVPDYAYPYDVPDYA

SEQ ID NO: 238 - protein, 1283 aa, Artificial Sequence
  Description of Artificial Sequence: Synthetic polypeptide
MNNYDEFTKLYPIQKTIRFELKPQGRTMEHLETFNFFEEDRDRAEKYKILKEAIDEYHKKFIDEHLTNMSLDWNSLKQISEKYYKSREEKDKKVFLSEQKRMRQEIVSEFKKDDRFKDLFSKKLFSELLKEEIYKKGNHQEIDALKSFDKFSGYFIGLHENRKNMYSDGDEITAISNRIVNENFPKFLDNLQKYQEARKKYPEWIIKAESALVAHNIKMDEVFSLEYFNKVLNQEGIQRYNLALGGYVTKSGEKMMGLNDALNLAHQSEKSSKGRIHMTPLFKQILSEKESFSYIPDVFTEDSQLLPSIGGFFAQIENDKDGNIFDRALELISSYAEYDTERIYIRQADINRVSNVIFGEWGTLGGLMREYKADSINDINLERTCKKVDKWLDSKEFALSDVLEAIKRTGNNDAFNEYISKMRTAREKIDAARKEMKFISEKISGDEESIHIIKTLLDSVQQFLHFFNLFKARQDIPLDGAFYAEFDEVHSKLFAIVPLYNKVRNYLTKNNLNTKKIKLNFKNPTLANGWDQNKVYDYASLIFLRDGNYYLGIINPKRKKNIKFEQGSGNGPFYRKMVYKQIPGPNKNLPRVFLTSTKGKKEYKPSKEIIEGYEADKHIRGDKFDLDFCHKLIDFFKESIEKHKDWSKFNFYFSPTESYGDISEFYLDVEKQGYRMHFENISAETIDEYVEKGDLFLFQIYNKDFVKAATGKKDMHTIYWNAAFSPENLQDVVVKLNGEAELFYRDKSDIKEIVHREGEILVNRTYNGRTPVPDKIHKKLTDYHNGRTKDLGEAKEYLDKVRYFKAHYDITKDRRYLNDKIYFHVPLTLNFKANGKKNLNKMVIEKFLSDEKAHIIGIDRGERNLLYYSIIDRSGKIIDQQSLNVIDGFDYREKLNQREIEMKDARQSWNAIGKIKDLKEGYLSKAVHEITKMAIQYNAIVVMEELNYGFKRGRFKVEKQIYQKFENMLIDKMNYLVFKDAPDESPGGVLNAYQLTNPLESFAKLGKQTGILFYVPAAYTSKIDPTTGFVNLFNTSSKTNAQERKEFLQKFESISYSAKDGGIFAFAFDYRKFGTSKTDHKNVWTAYTNGERMRYIKEKKRNELFDPSKEIKEALTSSGIKYDGGQNILPDILRSNNNGLIYTMYSSFIAAIQMRVYDGKEDYIISPIKNSKGEFFRTDPKRRELPIDADANGAYNIALRGELTMRAIAEKFDPDSEKMAKLELKHKDWFEFMQTRGDKRPAATKKAGQAKKKKGSYPYDVPDYAYPYDVPDYAYPYDVPDYA

SEQ ID NO: 239 - protein, 1327 aa, Artificial Sequence
  Description of Artificial Sequence: Synthetic polypeptide
MNGNRSIVYREFVGVIPVAKTLRNELRPVGHTQEHIIQNGLIQEDELRQEKSTELKNIMDDYYREYIDKSLSGVTDLDFTLLFELMNLVQSSPSKDNKKALEKEQSKMREQICTHLQSDSNYKNIFNAKLLKEILPDFIKNYNQYDVKDKAGKLETLALFNGFSTYFTDFFEKRKNVFTKEAVSTSIAYRIVHENSLIFLANMTSYKKISEKALDEIEVIEKNNQDKMGDWELNQIFNPDFYNMVLIQSGIDFYNEICGVVNAHMNLYCQQTKNNYNLFKMRKLHKQILAYTSTSFEVPKMFEDDMSVYNAVNAFIDETEKGNIIGKLKDIVNKYDELDEKRIYISKDFYETLSCFMSGNWNLITGCVENFYDENIHAKGKSKEEKVKKAVKEDKYKSINDVNDLVEKYIDEKERNEFKNSNAKQYIREISNIITDTETAHLEYDDHISLIESEEKADEMKKRLDMYMNMYHWAKAFIVDEVLDRDEMFYSDIDDIYNILENIVPLYNRVRNYVTQKPYNSKKIKLNFQSPTLANGWSQSKEFDNNAIILIRDNKYYLAIFNAKNKPDKKIIQGNSDKKNDNDYKKMVYNLLPGANKMLPKVFLSKKGIETFKPSDYIISGYNAHKHIKTSENFDISFCRDLIDYFKNSIEKHAEWRKYEFKFSATDSYSDISEFYREVEMQGYRIDWTYISEADINKLDEEGKIYLFQIYNKDFAENSTGKENLHTMYFKNIFSEENLKDIIIKLNGQAELFYRRASVKNPVKHKKDSVLVNKTYKNQLDNGDVVRIPIPDDIYNEIYKMYNGYIKESDLSEAAKEYLDKVEVRTAQKDIVKDYRYTVDKYFIHTPITINYKVTARNNVNDMVVKYIAQNDDIHVIGIDRGERNLIYISVIDSHGNIVKQKSYNILNNYDYKKKLVEKEKTREYARKNWKSIGNIKELKEGYISGVVHEIAMLIVEYNAIIAMEDLNYGFKRGRFKVERQVYQKFESMLINKLNYFASKEKSVDEPGGLLKGYQLTYVPDNIKNLGKQCGVIFYVPAAFTSKIDPSTGFISAFNFKSISTNASRKQFFMQFDEIRYCAEKDMFSFGFDYNNFDTYNITMGKTQWTVYTNGERLQSEFNNARRTGKTKSINLTETIKLLLEDNEINYADGHDIRIDMEKMDEDKKSEFFAQLLSLYKLTVQMRNSYTEAEEQENGISYDKIISPVINDEGEFFDSDNYKESDDKECKMPKDADANGAYCIALKGLYEVLKIKSEWTEDGFDRNCLKLPHAEWLDFIQNKRYEKRPAATKKAGQAKKKKGSYPYDVPDYAYPYDVPDYAYPYDVPDYA

SEQ ID NO: 240 - protein, 1418 aa, Artificial Sequence
  Description of Artificial Sequence: Synthetic polypeptide
MLFQDFTHLYPLSKTVRFELKPIDRTLEHIHAKNFLSQDETMADMHQKVKVILDDYHRDFIADMMGEVKLTKLAEFYDVYLKFRKNPKDDELQKQLKDLQAVLRKEIVKPIGNGGKYKAGYDRLFGAKLFKDGKELGDLAKFVIAQEGESSPKLAHLAHFEKFSTYFTGFHDNRKNMYSDEDKHTAIAYRLIHENLPRFIDNLQILTTIKQKHSALYDQIINELTASGLDVSLASHLDGYHKLLTQEGITAYNTLLGGISGEAGSPKIQGINELINSHHNQHCHKSERIAKLRPLHKQILSDGMSVSFLPSKFADDSEMCQAVNEFYRHYADVFAKVQSLFDGFDDHQKDGIYVEHKNLNELSKQAFGDFALLGRVLDGYYVDVVNPEFNERFAKAKTDNAKAKLTKEKDKFIKGVHSLASLEQAIEHYTARHDDESVQAGKLGQYFKHGLAGVDNPIQKIHNNHSTIKGFLERERPAGERALPKIKSGKNPEMTQLRQLKELLDNALNVAHFAKLLTTKTTLDNQDGNFYGEFGVLYDELAKIPTLYNKVRDYLSQKPFSTEKYKLNFGNPTLLNGWDLNKEKDNFGVILQKDGCYYLALLDKAHKKVFDNAPNTGKSIYQKMIYKYLEVRKQFPKVFFSKEAIAINYHPSKELVEIKDKGRQRSDDERLKLYRFILECLKIHPKYDKKFEGAIGDIQLFKKDKKGREVPISEKDLFDKINGIFSSKPKLEMEDFFIGEFKRYNPSQDLVDQYNIYKKIDSNDNRKKENFYNNHPKFKKDLVRYYYESMCKHEEWEESFEFSKKLQDIGCYVDVNELFTEIETRRLNYKISFCNINADYIDELVEQGQLYLFQIYNKDFSPKAHGKPNLHTLYFKALFSEDNLADPIYKLNGEAQIFYRKASLDMNETTIHRAGEVLENKNPDNPKKRQFVYDIIKDKRYTQDKFMLHVPITMNFGVQGMTIKEFNKKVNQSIQQYDEVNVIGIDRGERHLLYLTVINSKGEILEQCSLNDITTASANGTQMTTPYHKILDKREIERLNARVGWGEIETIKELKSGYLSHVVHQISQLMLKYNAIVVLEDLNFGFKRGRFKVEKQIYQNFENALIKKLNHLVLKDKADDEIGSYKNALQLTNNFTDLKSIGKQTGFLFYVPAWNTSKIDPETGFVDLLKPRYENIAQSQAFFGKFDKICYNADKDYFEFHIDYAKFTDKAKNSRQIWTICSHGDKRYVYDKTANQNKGAAKGINVNDELKSLFARHHINEKQPNLVMDICQNNDKEFHKSLMYLLKTLLALRYSNASSDEDFILSPVANDEGVFFNSALADDTQPQNADANGAYHIALKGLWLLNELKNSDDLNKVKLAIDNQTWLNFAQNRKRPAATKKAGQAKKKKGSYPYDVPDYAYPYDVPDYAYPYDVPDYA

SEQ ID NO: 241 - protein, 1308 aa, Artificial Sequence
  Description of Artificial Sequence: Synthetic polypeptide
MEDYSGFVNIYSIQKTLRFELKPVGKTLEHIEKKGFLKKDKIRAEDYKAVKKIIDKYHRAYIEEVFDSVLHQKKKKDKTRFSTQFIKEIKEFSELYYKTEKNIPDKERLEALSEKLRKMLVGAFKGEFSEEVAEKYKNLFSKELIRNEIEKFCETDEERKQVSNFKSFTTYFTGFHSNRQNIYSDEKKSTAIGYRIIHQNLPKFLDNLKIIESIQRRFKDFPWSDLKKNLKKIDKNIKLTEYFSIDGFVNVLNQKGIDAYNTILGGKSEESGEKIQGLNEYINLYRQKNNIDRKNLPNVKILFKQILGDRETKSFIPEAFPDDQSVLNSITEFAKYLKLDKKKKSIIAELKKFLSSFNRYELDGIYLANDNSLASISTFLFDDWSFIKKSVSFKYDESVGDPKKKIKSPLKYEKEKEKWLKQKYYTISFLNDAIESYSKSQDEKRVKIRLEAYFAEFKSKDDAKKQFDLLERIEEAYAIVEPLLGAEYPRDRNLKADKKEVGKIKDFLDSIKSLQFFLKPLLSAEIFDEKDLGFYNQLEGYYEEIDSIGHLYNKVRNYLTGKIYSKEKFKLNFENSTLLKGWDENREVANLCVIFREDQKYYLGVMDKENNTILSDIPKVKPNELFYEKMVYKLIPTPHMQLPRIIFSSDNLSIYNPSKSILKIREAKSFKEGKNFKLKDCHKFIDFYKESISKNEDWSRFDFKFSKTSSYENISEFYREVERQGYNLDFKKVSKFYIDSLVEDGKLYLFQIYNKDFSIFSKGKPNLHTIYFRSLFSKENLKDVCLKLNGEAEMFFRKKSINYDEKKKREGHHPELFEKLKYPILKDKRYSEDKFQFHLPISLNFKSKERLNFNLKVNEFLKRNKDINIIGIDRGERNLLYLVMINQKGEILKQTLLDSMQSGKGRPEINYKEKLQEKEIERDKARKSWGTVENIKELKEGYLSIVIHQISKLMVENNAIVVLEDLNIGFKRGRQKVERQVYQKFEKMLIDKLNFLVFKENKPTEPGGVLKAYQLTDEFQSFEKLSKQTGFLFYVPSWNTSKIDPRTGFIDFLHPAYENIEKAKQWINKFDSIRFNSKMDWFEFTADTRKFSENLMLGKNRVWVICTTNVERYFTSKTANSSIQYNSIQITEKLKELFVDIPFSNGQDLKPEILRKNDAVFFKSLLFYIKTTLSLRQNNGKKGEEEKDFILSPVVDSKGRFFNSLEASDDEPKDADANGAYHIALKGLMNLLVLNETKEENLSRPKWKIKNKDWLEFVWERNRKRPAATKKAGQAKKKKGSYPYDVPDYAYPYDVPDYAYPYDVPDYA

SEQ ID NO: 242 - protein, 1273 aa, Artificial Sequence
  Description of Artificial Sequence: Synthetic polypeptide
MSKLEKFTNCYSLSKTLRFKAIPVGKTQENIDNKRLLVEDEKRAEDYKGVKKLLDRYYLSFINDVLHSIKLKNLNNYISLFRKKTRTEKENKELENLEINLRKEIAKAFKGNEGYKSLFKKDIIETILPEFLDDKDEIALVNSFNGFTTAFTGFFDNRENMFSEEAKSTSIAFRCINENLTRYISNMDIFEKVDAIFDKHEVQEIKEKILNSDYDVEDFFEGEFFNFVLTQEGIDVYNAIIGGFVTESGEKIKGLNEYINLYNQKTKQKLPKFKPLYKQVLSDRESLSFYGEGYTSDEEVLEVFRNTLNKNSEIFSSIKKLEKLFKNFDEYSSAGIFVKNGPAISTISKDIFGEWNVIRDKWNAEYDDIHLKKKAVVTEKYEDDRRKSFKKIGSFSLEQLQEYADADLSVVEKLKEIIIQKVDEIYKVYGSSEKLFDADFVLEKSLKKNDAVVAIMKDLLDSVKSFENYIKAFFGEGKETNRDESFYGDFVLAYDILLKVDHIYDAIRNYVTQKPYSKDKFKLYFQNPQFMGGWDKDKETDYRATILRYGSKYYLAIMDKKYAKCLQKIDKDDVNGNYEKINYKLLPGPNKMLPKVFFSKKWMAYYNPSEDIQKIYKNGTFKKGDMFNLNDCHKLIDFFKDSISRYPKWSNAYDFNFSETEKYKDIAGFYREVEEQGYKVSFESASKKEVDKLVEEGKLYMFQIYNKDFSDKSHGTPNLHTMYFKLLFDENNHGQIRLSGGAELFMRRASLKKEELVVHPANSPIANKNPDNPKKTTTLSYDVYKDKRFSEDQYELHIPIAINKCPKNIFKINTEVRVLLKHDDNPYVIGIDRGERNLLYIVVVDGKGNIVEQYSLNEIINNFNGIRIKTDYHSLLDKKEKERFEARQNWTSIENIKELKAGYISQVVHKICELVEKYDAVIALEDLNSGFKNSRVKVEKQVYQKFEKMLIDKLNYMVDKKSNPCATGGALKGYQITNKFESFKSMSTQNGFIFYIPAWLTSKIDPSTGFVNLLKTKYTSIADSKKFISSFDRIMYVPEEDLFEFALDYKNFSRTDADYIKKWKLYSYGNRIRIFRNPKKNNVFDWEEVCLTSAYKELFNKYGINYQQGDIRALLCEQSDKAFYSSFMALMSLMLQMRNSITGRTDVDFLISPVKNSDGIFYDSRNYEAQENAILPKNADANGAYNIARKVLWAIGQFKKAEDEKLDKVKIAISNKEWLEYAQTSVKHKRPAATKKAGQAKKKKGSYPYDVPDYAYPYDVPDYAYPYDVPDYA

SEQ ID NO: 243 - protein, 1305 aa, Artificial Sequence
  Description of Artificial Sequence: Synthetic polypeptide
MDSLKDFTNLYPVSKTLRFELKPVGKTLENIEKAGILKEDEHRAESYRRVKKIIDTYHKVFIDSSLENMAKMGIENEIKAMLQSFCELYKKDHRTEGEDKALDKIRAVLRGLIVGAFTGVCGRRENTVQNEKYESLFKEKLIKEILPDFVLSTEAESLPFSVEEATRSLKEFDSFTSYFAGFYENRKNIYSTKPQSTAIAYRLIHENLPKFIDNILVFQKIKEPIAKELEHIRADFSAGGYIKKDERLEDIFSLNYYIHVLSQAGIEKYNALIGKIVTEGDGEMKGLNEHINLYNQQRGREDRLPLFRPLYKQILSDREQLSYLPESFEKDEELLRALKEFYDHIAEDILGRTQQLMTSISEYDLSRIYVRNDSQLTDISKKMLGDWNAIYMARERAYDHEQAPKRITAKYERDRIKALKGEESISLANLNSCIAFLDNVRDCRVDTYLSTLGQKEGPHGLSNLVENVFASYHEAEQLLSFPYPEENNLIQDKDNVVLIKNLLDNISDLQRFLKPLWGMGDEPDKDERFYGEYNYIRGALDQVIPLYNKVRNYLTRKPYSTRKVKLNFGNSQLLSGWDRNKEKDNSCVILRKGQNFYLAIMNNRHKRSFENKMLPEYKEGEPYFEKMDYKFLPDPNKMLPKVFLSKKGIEIYKPSPKLLEQYGHGTHKKGDTFSMDDLHELIDFFKHSIEAHEDWKQFGFKFSDTATYENVSSFYREVEDQGYKLSFRKVSESYVYSLIDQGKLYLFQIYNKDFSPCSKGTPNLHTLYWRMLFDERNLADVIYKLDGKAEIFFREKSLKNDHPTHPAGKPIKKKSRQKKGEESLFEYDLVKDRRYTMDKFQFHVPITMNFKCSAGSKVNDMVNAHIREAKDMHVIGIDRGERNLLYICVIDSRGTILDQISLNTINDIDYHDLLESRDKDRQQEHRNWQTIEGIKELKQGYLSQAVHRIAELMVAYKAVVALEDLNMGFKRGRQKVESSVYQQFEKQLIDKLNYLVDKKKRPEDIGGLLRAYQFTAPFKSFKEMGKQNGFLFYIPAWNTSNIDPTTGFVNLFHVQYENVDKAKSFFQKFDSISYNPKKDWFEFAFDYKNFTKKAEGSRSMWILCTHGSRIKNFRNSQKNGQWDSEEFALTEAFKSLFVRYEIDYTADLKTAIVDEKQKDFFVDLLKLFKLTVQMRNSWKEKDLDYLISPVAGADGRFFDTREGNKSLPKDADANGAYNIALKGLWALRQIRQTSEGGKLKLAISNKEWLQFVQERSYEKDKRPAATKKAGQAKKKKGSYPYDVPDYAYPYDVPDYAYPYDVPDYA

SEQ ID NO: 244 - protein, 1368 aa, Artificial Sequence
  Description of Artificial Sequence: Synthetic polypeptide
MENYQEFTNLFQLNKTLRFELKPIGKTCELLEEGKIFASGSFLEKDKVRADNVSYVKKEIDKKHKIFIEETLSSFSISNDLLKQYFDCYNELKAFKKDCKSDEEEVKKTALRNKCTSIQRAMREAISQAFLKSPQKKLLAIKNLIENVFKADENVQHFSEFTSYFSGFETNRENFYSDEEKSTSIAYRLVHDNLPIFIKNIYIFEKLKEQFDAKTLSEIFENYKLYVAGSSLDEVFSLEYFNNTLTQKGIDNYNAVIGKIVKEDKQEIQGLNEHINLYNQKHKDRRLPFFISLKKQILSDREALSWLPDMFKNDSEVIKALKGFYIEDGFENNVLTPLATLLSSLDKYNLNGIFIRNNEALSSLSQNVYRNFSIDEAIDANAELQTFNNYELIANALRAKIKKETKQGRKSFEKYEEYIDKKVKAIDSLSIQEINELVENYVSEFNSNSGNMPRKVEDYFSLMRKGDFGSNDLIENIKTKLSAAEKLLGTKYQETAKDIFKKDENSKLIKELLDATKQFQHFIKPLLGTGEEADRDLVFYGDFLPLYEKFEELTLLYNKVRNRLTQKPYSKDKIRLCFNKPKLMTGWVDSKTEKSDNGTQYGGYLFRKKNEIGEYDYFLGISSKAQLFRKNEAVIGDYERLDYYQPKANTIYGSAYEGENSYKEDKKRLNKVIIAYIEQIKQTNIKKSIIESISKYPNISDDDKVTPSSLLEKIKKVSIDSYNGILSFKSFQSVNKEVIDNLLKTISPLKNKAEFLDLINKDYQIFTEVQAVIDEICKQKTFIYFPISNVELEKEMGDKDKPLCLFQISNKDLSFAKTFSANLRKKRGAENLHTMLFKALMEGNQDNLDLGSGAIFYRAKSLDGNKPTHPANEAIKCRNVANKDKVSLFTYDIYKNRRYMENKFLFHLSIVQNYKAANDSAQLNSSATEYIRKADDLHIIGIDRGERNLLYYSVIDMKGNIVEQDSLNIIRNNDLETDYHDLLDKREKERKANRQNWEAVEGIKDLKKGYLSQAVHQIAQLMLKYNAIIALEDLGQMFVTRGQKIEKAVYQQFEKSLVDKLSYLVDKKRPYNELGGILKAYQLASSITKNNSDKQNGFLFYVPAWNTSKIDPVTGFTDLLRPKAMTIKEAQDFFGAFDNISYNDKGYFEFETNYDKFKIRMKSAQTRWTICTFGNRIKRKKDKNYWNYEEVELTEEFKKLFKDSNIDYENCNLKEEIQNKDNRKFFDDLIKLLQLTLQMRNSDDKGNDYIISPVANAEGQFFDSRNGDKKLPLDADANGAYNIARKGLWNIRQIKQTKNDKKLNLSISSTEWLDFVREKPYLKKRPAATKKAGQAKKKKGSYPYDVPDYAYPYDVPDYAYPYDVPDYA

SEQ ID NO: 245 - protein, 1291 aa, Artificial Sequence
  Description of Artificial Sequence: Synthetic polypeptide
MKTQHFFEDFTSLYSLSKTIRFELKPIGKTLENIKKNGLIRRDEQRLDDYEKLKKVIDEYHEDFIANILSSFSFSEEILQSYIQNLSESEARAKIEKTMRDTLAKAFSEDERYKSIFKKELVKKDIPVWCPAYKSLCKKFDNFTTSLVPFHENRKNLYTSNEITASIPYRIVHVNLPKFIQNIEALCELQKKMGADLYLEMMENLRNVWPSFVKTPDDLCNLKTYNHLMVQSSISEYNRFVGGYSTEDGTKHQGINEWINIYRQRNKEMRLPGLVFLHKQILAKVDSSSFISDTLENDDQVFCVLRQFRKLFWNTVSSKEDDAASLKDLFCGLSGYDPEAIYVSDAHLATISKNIFDRWNYISDAIRRKTEVLMPRKKESVERYAEKISKQIKKRQSYSLAELDDLLAHYSEESLPAGFSLLSYFTSLGGQKYLVSDGEVILYEEGSNIWDEVLIAFRDLQVILDKDFTEKKLGKDEEAVSVIKKALDSALRLRKFFDLLSGTGAEIRRDSSFYALYTDRMDKLKGLLKMYDKVRNYLTKKPYSIEKFKLHFDNPSLLSGWDKNKELNNLSVIFRQNGYYYLGIMTPKGKNLFKTLPKLGAEEMFYEKMEYKQIAEPMLMLPKVFFPKKTKPAFAPDQSVVDIYNKKTFKTGQKGFNKKDLYRLIDFYKEALTVHEWKLFNFSFSPTEQYRNIGEFFDEVREQAYKVSMVNVPASYIDEAVENGKLYLFQIYNKDFSPYSKGIPNLHTLYWKALFSEQNQSRVYKLCGGGELFYRKASLHMQDTTVHPKGISIHKKNLNKKGETSLFNYDLVKDKRFTEDKFFFHVPISINYKNKKITNVNQMVRDYIAQNDDLQIIGIDRGERNLLYISRIDTRGNLLEQFSLNVIESDKGDLRTDYQKILGDREQERLRRRQEWKSIESIKDLKDGYMSQVVHKICNMVVEHKAIVVLENLNLSFMKGRKKVEKSVYEKFERMLVDKLNYLVVDKKNLSNEPGGLYAAYQLTNPLFSFEELHRYPQSGILFFVDPWNTSLTDPSTGFVNLLGRINYTNVGDARKFFDRFNAIRYDGKGNILFDLDLSRFDVRVETQRKLWTLTTFGSRIAKSKKSGKWMVERIENLSLCFLELFEQFNIGYRVEKDLKKAILSQDRKEFYVRLIYLFNLMMQIRNSDGEEDYILSPALNEKNLQFDSRLIEAKDLPVDADANGAYNVARKGLMVVQRIKRGDHESIHRIGRAQWLRYVQEGIVEKRPAATKKAGQAKKKKGSYPYDVPDYAYPYDVPDYAYPYDVPDYA

SEQ ID NO: 246 - protein, 18 aa, Alicyclobacillus sp.
LRVMSVDLGLRTSASISV

SEQ ID NO: 247 - protein, 22 aa, Alicyclobacillus sp.
QRTLRQLRTQLAYLRLLVRCGS

SEQ ID NO: 248 - protein, 12 aa, Alicyclobacillus sp.
CQLILLEELSEY

SEQ ID NO: 249 - protein, 16 aa, Alicyclobacillus sp.
HQIHADLNAAQNLQQR

SEQ ID NO: 250 - protein, 18 aa, Alicyclobacillus sp.
LRVMSVDLGLRTSASISV

SEQ ID NO: 251 - protein, 22 aa, Alicyclobacillus sp.
QRTLRQLRTQLAYLRLLVRCGS

SEQ ID NO: 252 - protein, 12 aa, Alicyclobacillus sp.
CQLILLEELSEY

SEQ ID NO: 253 - protein, 16 aa, Alicyclobacillus sp.
HQIHADLNAAQNLQQR

SEQ ID NO: 254 - protein, 18 aa, Alicyclobacillus sp.
LRVMSVDLGLRTSASISV

SEQ ID NO: 255 - protein, 22 aa, Alicyclobacillus sp.
QRTLRQLRTQLAYLRLLVRCGS

SEQ ID NO: 256 - protein, 12 aa, Alicyclobacillus sp.
CQLILLEELSEY

SEQ ID NO: 257 - protein, 16 aa, Alicyclobacillus sp.
HQIHADLNAAQNLQQR

SEQ ID NO: 258 - protein, 18 aa, Alicyclobacillus sp.
LRVMSVDLGLRTSASISV

SEQ ID NO: 259 - protein, 22 aa, Alicyclobacillus sp.
QRTLRQLRTQLAYLRLLVRCGS

SEQ ID NO: 260 - protein, 12 aa, Alicyclobacillus sp.
CQLILLEELSEY

SEQ ID NO: 261 - protein, 16 aa, Alicyclobacillus sp.
HQIHADLNAAQNLQQR

SEQ ID NO: 262 - protein, 18 aa, Alicyclobacillus sp.
LRVMSVDLGLRTSASISV

SEQ ID NO: 263 - protein, 22 aa, Alicyclobacillus sp.
QRTLRQLRTQLAYLRLLVRCGS

SEQ ID NO: 264 - protein, 12 aa, Alicyclobacillus sp.
CQLILLEELSEY

SEQ ID NO: 265 - protein, 16 aa, Alicyclobacillus sp.
HQIHADLNAAQNLQQR

SEQ ID NO: 266 - protein, 18 aa, Alicyclobacillus sp.
LRVMSVDLGLRTSASISV

SEQ ID NO: 267 - protein, 22 aa, Alicyclobacillus sp.
QRTLRQLRTQLAYLRLLVRCGS

SEQ ID NO: 268 - protein, 12 aa, Alicyclobacillus sp.
CQLILLEELSEY

SEQ ID NO: 269 - protein, 16 aa, Alicyclobacillus sp.
HQIHADLNAAQNLQQR

SEQ ID NO: 270 - protein, 18 aa, Alicyclobacillus sp.
LRVMSVDLGLRTSASISV

SEQ ID NO: 271 - protein, 22 aa, Alicyclobacillus sp.
QRTLRQLRTQLAYLRLLVRCGS

SEQ ID NO: 272 - protein, 12 aa, Alicyclobacillus sp.
CQLILLEELSEY

SEQ ID NO: 273 - protein, 16 aa, Alicyclobacillus sp.
HQIHADLNAAQNLQQR

SEQ ID NO: 274 - protein, 18 aa, Alicyclobacillus sp.
LRVMSVDLGLRTSASISV

SEQ ID NO: 275 - protein, 22 aa, Alicyclobacillus sp.
QRTLRQLRTQLAYLRLLVRCGS

SEQ ID NO: 276 - protein, 12 aa, Alicyclobacillus sp.
CQLILLEELSEY

SEQ ID NO: 277 - protein, 16 aa, Alicyclobacillus sp.
HQIHADLNAAQNLQQR

SEQ ID NO: 278 - protein, 18 aa, Alicyclobacillus sp.
LKIIGIDRGERNLIYVTM

SEQ ID NO: 279 - protein, 22 aa, Alicyclobacillus sp.
RKALDVREYDNKEARRNWTKVE

SEQ ID NO: 280 - protein, 13 aa, Alicyclobacillus sp.
NAIIVMEDLNHGF

SEQ ID NO: 281 - protein, 16 aa, Alicyclobacillus sp.
LPQDSDANGAYNIALK

SEQ ID NO: 282 - protein, 18 aa, Alicyclobacillus sp.
LKIIGIDRGERNLIYVTM

SEQ ID NO: 283 - protein, 22 aa, Alicyclobacillus sp.
RKALDVREYDNKEARRNWTKVE

SEQ ID NO: 284 - protein, 13 aa, Alicyclobacillus sp.
NAIIVMEDLNHGF

SEQ ID NO: 285 - protein, 16 aa, Alicyclobacillus sp.
LPQDSDANGAYNIALK

SEQ ID NO: 286 - protein, 18 aa, Alicyclobacillus sp.
LKIIGIDRGERNLIYVTM

SEQ ID NO: 287 - protein, 22 aa, Alicyclobacillus sp.
RKALDVREYDNKEARRNWTKVE

SEQ ID NO: 288 - protein, 13 aa, Alicyclobacillus sp.
NAIIVMEDLNHGF

SEQ ID NO: 289 - protein, 16 aa, Alicyclobacillus sp.
LPQDSDANGAYNIALK

SEQ ID NO: 290 - protein, 18 aa, Alicyclobacillus sp.
LKIIGIDRGERNLIYVTM

SEQ ID NO: 291 - protein, 22 aa, Alicyclobacillus sp.
RKALDVREYDNKEARRNWTKVE

SEQ ID NO: 292 - protein, 13 aa, Alicyclobacillus sp.
NAIIVMEDLNHGF

SEQ ID NO: 293 - protein, 16 aa, Alicyclobacillus sp.
LPQDSDANGAYNIALK

SEQ ID NO: 294 - protein, 18 aa, Alicyclobacillus sp.
LKIIGIDRGERNLIYVTM

SEQ ID NO: 295 - protein, 22 aa, Alicyclobacillus sp.
RKALDVREYDNKEARRNWTKVE

SEQ ID NO: 296 - protein, 13 aa, Alicyclobacillus sp.
NAIIVMEDLNHGF

SEQ ID NO: 297 - protein, 16 aa, Alicyclobacillus sp.
LPQDSDANGAYNIALK

SEQ ID NO: 298 - protein, 18 aa, Alicyclobacillus sp.
LKIIGIDRGERNLIYVTM

SEQ ID NO: 299 - protein, 22 aa, Alicyclobacillus sp.
RKALDVREYDNKEARRNWTKVE

SEQ ID NO: 300 - protein, 13 aa, Alicyclobacillus sp.
NAIIVMEDLNHGF

SEQ ID NO: 301 - protein, 16 aa, Alicyclobacillus sp.
LPQDSDANGAYNIALK

SEQ ID NO: 302 - protein, 18 aa, Alicyclobacillus sp.
LKIIGIDRGERNLIYVTM

SEQ ID NO: 303 - protein, 22 aa, Alicyclobacillus sp.
RKALDVREYDNKEARRNWTKVE

SEQ ID NO: 304 - protein, 13 aa, Alicyclobacillus sp.
NAIIVMEDLNHGF

SEQ ID NO: 305 - protein, 16 aa, Alicyclobacillus sp.
LPQDSDANGAYNIALK

SEQ ID NO: 306 - protein, 18 aa, Alicyclobacillus sp.
LKIIGIDRGERNLIYVTM

SEQ ID NO: 307 - protein, 22 aa, Alicyclobacillus sp.
RKALDVREYDNKEARRNWTKVE

SEQ ID NO: 308 - protein, 13 aa, Alicyclobacillus sp.
NAIIVMEDLNHGF

SEQ ID NO: 309 - protein, 16 aa, Alicyclobacillus sp.
LPQDSDANGAYNIALK

SEQ ID NO: 310 - protein, 18 aa, Alicyclobacillus sp.
LKIIGIDRGERNLIYVTM

SEQ ID NO: 311 - protein, 22 aa, Alicyclobacillus sp.
RKALDVREYDNKEARRNWTKVE

SEQ ID NO: 312 - protein, 13 aa, Alicyclobacillus sp.
NAIIVMEDLNHGF

SEQ ID NO: 313 - protein, 16 aa, Alicyclobacillus sp.
LPQDSDANGAYNIALK

SEQ ID NO: 314 - protein, 18 aa, Alicyclobacillus sp.
GKVVAIDVGVEKLLITSD

SEQ ID NO: 315 - protein, 23 aa, Alicyclobacillus sp.
VKHIHRELSRKKFLSNNWFKAKV

SEQ ID NO: 316 - protein, 13 aa, Alicyclobacillus sp.
YDVVVMEGIHAKQ

SEQ ID NO: 317 - protein, 16 aa, Alicyclobacillus sp.
WIADRDYNASLNILRG

SEQ ID NO: 318 - protein, 18 aa, Alicyclobacillus sp.
GKVVAIDVGVEKLLITSD

SEQ ID NO: 319 - protein, 23 aa, Alicyclobacillus sp.
VKHIHRELSRKKFLSNNWFKAKV

SEQ ID NO: 320 - protein, 13 aa, Alicyclobacillus sp.
YDVVVMEGIHAKQ

SEQ ID NO: 321 - protein, 16 aa, Alicyclobacillus sp.
WIADRDYNASLNILRG

SEQ ID NO: 322 - protein, 18 aa, Alicyclobacillus sp.
GKVVAIDVGVEKLLITSD

SEQ ID NO: 323 - protein, 23 aa, Alicyclobacillus sp.
VKHIHRELSRKKFLSNNWFKAKV

SEQ ID NO: 324 - protein, 13 aa, Alicyclobacillus sp.
YDVVVMEGIHAKQ

SEQ ID NO: 325 - protein, 16 aa, Alicyclobacillus sp.
WIADRDYNASLNILRG

SEQ ID NO: 326 - protein, 18 aa, Alicyclobacillus sp.
GKVVAIDVGVEKLLITSD

SEQ ID NO: 327 - protein, 23 aa, Alicyclobacillus sp.
VKHIHRELSRKKFLSNNWFKAKV

SEQ ID NO: 328 - protein, 13 aa, Alicyclobacillus sp.
YDVVVMEGIHAKQ

SEQ ID NO: 329 - protein, 16 aa, Alicyclobacillus sp.
WIADRDYNASLNILRG

SEQ ID NO: 330 - protein, 18 aa, Alicyclobacillus sp.
GKVVAIDVGVEKLLITSD

SEQ ID NO: 331 - protein, 23 aa, Alicyclobacillus sp.
VKHIHRELSRKKFLSNNWFKAKV

SEQ ID NO: 332 - protein, 13 aa, Alicyclobacillus sp.
YDVVVMEGIHAKQ

SEQ ID NO: 333 - protein, 16 aa, Alicyclobacillus sp.
WIADRDYNASLNILRG

SEQ ID NO: 334 - protein, 18 aa, Alicyclobacillus sp.
GKVVAIDVGVEKLLITSD

SEQ ID NO: 335 - protein, 23 aa, Alicyclobacillus sp.
VKHIHRELSRKKFLSNNWFKAKV

SEQ ID NO: 336 - protein, 13 aa, Alicyclobacillus sp.
YDVVVMEGIHAKQ

SEQ ID NO: 337 - protein, 16 aa, Alicyclobacillus sp.
WIADRDYNASLNILRG

SEQ ID NO: 338 - protein, 18 aa, Alicyclobacillus sp.
GKVVAIDVGVEKLLITSD

SEQ ID NO: 339 - protein, 23 aa, Alicyclobacillus sp.
VKHIHRELSRKKFLSNNWFKAKV

SEQ ID NO: 340 - protein, 13 aa, Alicyclobacillus sp.
YDVVVMEGIHAKQ

SEQ ID NO: 341 - protein, 16 aa, Alicyclobacillus sp.
WIADRDYNASLNILRG

SEQ ID NO: 342 - protein, 18 aa, Alicyclobacillus sp.
MYYLGLDIGTNSVGYAVT

SEQ ID NO: 343 - protein, 22 aa, Alicyclobacillus sp.
AERRSFRTSRRRLDRRQQRVKL

SEQ ID NO: 344 - protein, 13 aa, Alicyclobacillus sp.
PKRIFIEMARDGE

SEQ ID NO: 345 - protein, 16 aa, Alicyclobacillus sp.
LHHAKDAFLAIVTGNV

SEQ ID NO: 346 - protein, 18 aa, Alicyclobacillus sp.
MYYLGLDIGTNSVGYAVT

SEQ ID NO: 347 - protein, 22 aa, Alicyclobacillus sp.
AERRSFRTSRRRLDRRQQRVKL

SEQ ID NO: 348 - protein, 13 aa, Alicyclobacillus sp.
PKRIFIEMARDGE

SEQ ID NO: 349 - protein, 16 aa, Alicyclobacillus sp.
LHHAKDAFLAIVTGNV

SEQ ID NO: 350 - protein, 18 aa, Alicyclobacillus sp.
MYYLGLDIGTNSVGYAVT

SEQ ID NO: 351 - protein, 22 aa, Alicyclobacillus sp.
AERRSFRTSRRRLDRRQQRVKL

SEQ ID NO: 352 - protein, 13 aa, Alicyclobacillus sp.
PKRIFIEMARDGE

SEQ ID NO: 353 - protein, 16 aa, Alicyclobacillus sp.
LHHAKDAFLAIVTGNV

SEQ ID NO: 354 - protein, 18 aa, Alicyclobacillus sp.
MYYLGLDIGTNSVGYAVT

SEQ ID NO: 355 - protein, 22 aa, Alicyclobacillus sp.
AERRSFRTSRRRLDRRQQRVKL

SEQ ID NO: 356 - protein, 13 aa, Alicyclobacillus sp.
PKRIFIEMARDGE

SEQ ID NO: 357 - protein, 16 aa, Alicyclobacillus sp.
LHHAKDAFLAIVTGNV

SEQ ID NO: 358 - protein, 18 aa, Alicyclobacillus sp.
MYYLGLDIGTNSVGYAVT

SEQ ID NO: 359 - protein, 22 aa, Alicyclobacillus sp.
AERRSFRTSRRRLDRRQQRVKL

SEQ ID NO: 360 - protein, 13 aa, Alicyclobacillus sp.
PKRIFIEMARDGE

SEQ ID NO: 361 - protein, 16 aa, Alicyclobacillus sp.
LHHAKDAFLAIVTGNV

SEQ ID NO: 362 - protein, 18 aa, Alicyclobacillus sp.
MYYLGLDIGTNSVGYAVT

SEQ ID NO: 363 - protein, 22 aa, Alicyclobacillus sp.
AERRSFRTSRRRLDRRQQRVKL

SEQ ID NO: 364 - protein, 13 aa, Alicyclobacillus sp.
PKRIFIEMARDGE

SEQ ID NO: 365 - protein, 16 aa, Alicyclobacillus sp.
LHHAKDAFLAIVTGNV

SEQ ID NO: 366 - protein, 18 aa, Alicyclobacillus sp.
MYYLGLDIGTNSVGYAVT

SEQ ID NO: 367 - protein, 22 aa, Alicyclobacillus sp.
AERRSFRTSRRRLDRRQQRVKL

SEQ ID NO: 368 - protein, 13 aa, Alicyclobacillus sp.
PKRIFIEMARDGE

SEQ ID NO: 369 - protein, 16 aa, Alicyclobacillus sp.
LHHAKDAFLAIVTGNV

SEQ ID NO: 370 - protein, 18 aa, Alicyclobacillus sp.
MYYLGLDIGTNSVGYAVT

SEQ ID NO: 371 - protein, 22 aa, Alicyclobacillus sp.
AERRSFRTSRRRLDRRQQRVKL

SEQ ID NO: 372 - protein, 13 aa, Alicyclobacillus sp.
PKRIFIEMARDGE

SEQ ID NO: 373 - protein, 16 aa, Alicyclobacillus sp.
LHHAKDAFLAIVTGNV

SEQ ID NO: 374 - protein, 18 aa, Alicyclobacillus sp.
MYYLGLDIGTNSVGYAVT

SEQ ID NO: 375 - protein, 22 aa, Alicyclobacillus sp.
AERRSFRTSRRRLDRRQQRVKL

SEQ ID NO: 376 - protein, 13 aa, Alicyclobacillus sp.
PKRIFIEMARDGE

SEQ ID NO: 377 - protein, 16 aa, Alicyclobacillus sp.
LHHAKDAFLAIVTGNV

SEQ ID NO: 378 - protein, 18 aa, Alicyclobacillus sp.
MYYLGLDIGTNSVGYAVT

SEQ ID NO: 379 - protein, 22 aa, Alicyclobacillus sp.
AERRSFRTSRRRLDRRQQRVKL

SEQ ID NO: 380 - protein, 13 aa, Alicyclobacillus sp.
PKRIFIEMARDGE

SEQ ID NO: 381 - protein, 16 aa, Alicyclobacillus sp.
LHHAKDAFLAIVTGNV

SEQ ID NO: 382 - protein, 18 aa, Alicyclobacillus sp.
MYYLGLDIGTNSVGYAVT

SEQ ID NO: 383 - protein, 22 aa, Alicyclobacillus sp.
AERRSFRTSRRRLDRRQQRVKL

SEQ ID NO: 384 - protein, 13 aa, Alicyclobacillus sp.
PKRIFIEMARDGE

SEQ ID NO: 385 - protein, 16 aa, Alicyclobacillus sp.
LHHAKDAFLAIVTGNV

SEQ ID NO: 386 - protein, 18 aa, Alicyclobacillus sp.
MYYLGLDIGTNSVGYAVT

SEQ ID NO: 387 - protein, 22 aa, Alicyclobacillus sp.
AERRSFRTSRRRLDRRQQRVKL

SEQ ID NO: 388 - protein, 13 aa, Alicyclobacillus sp.
PKRIFIEMARDGE

SEQ ID NO: 389 - protein, 16 aa, Alicyclobacillus sp.
LHHAKDAFLAIVTGNV

SEQ ID NO: 390 - protein, 18 aa, Alicyclobacillus sp.
MYYLGLDIGTNSVGYAVT

SEQ ID NO: 391 - protein, 22 aa, Alicyclobacillus sp.
AERRSFRTSRRRLDRRQQRVKL

SEQ ID NO: 392 - protein, 13 aa, Alicyclobacillus sp.
PKRIFIEMARDGE

SEQ ID NO: 393 - protein, 16 aa, Alicyclobacillus sp.
LHHAKDAFLAIVTGNV

SEQ ID NO: 394 - protein, 18 aa, Alicyclobacillus sp.
KVSLGVDTGQRHIGFAIV

SEQ ID NO: 395 - protein, 23 aa, Alicyclobacillus sp.
YTRKIYRRSKRNRKTRYRQARFL

SEQ ID NO: 396 - protein, 13 aa, Alicyclobacillus sp.
NPDLHIEVGKFDM

SEQ ID NO: 397 - protein, 15 aa, Alicyclobacillus sp.
KGHFMDAIAISGIKP

SEQ ID NO: 398 - protein, 18 aa, Alicyclobacillus sp.
KVSLGVDTGQRHIGFAIV

SEQ ID NO: 399 - protein, 23 aa, Alicyclobacillus sp.
YTRKIYRRSKRNRKTRYRQARFL

SEQ ID NO: 400 - protein, 13 aa, Alicyclobacillus sp.
NPDLHIEVGKFDM

SEQ ID NO: 401 - protein, 15 aa, Alicyclobacillus sp.
KGHFMDAIAISGIKP

SEQ ID NO: 402 - protein, 18 aa, Alicyclobacillus sp.
KVSLGVDTGQRHIGFAIV

SEQ ID NO: 403 - protein, 23 aa, Alicyclobacillus sp.
YTRKIYRRSKRNRKTRYRQARFL

SEQ ID NO: 404 - protein, 13 aa, Alicyclobacillus sp.
NPDLHIEVGKFDM

SEQ ID NO: 405 - protein, 15 aa, Alicyclobacillus sp.
KGHFMDAIAISGIKP

SEQ ID NO: 406 - protein, 18 aa, Alicyclobacillus sp.
KVSLGVDTGQRHIGFAIV

SEQ ID NO: 407 - protein, 23 aa, Alicyclobacillus sp.
YTRKIYRRSKRNRKTRYRQARFL

SEQ ID NO: 408 - protein, 13 aa, Alicyclobacillus sp.
NPDLHIEVGKFDM

SEQ ID NO: 409 - protein, 15 aa, Alicyclobacillus sp.
KGHFMDAIAISGIKP

SEQ ID NO: 410 - protein, 18 aa, Alicyclobacillus sp.
KVSLGVDTGQRHIGFAIV

SEQ ID NO: 411 - protein, 23 aa, Alicyclobacillus sp.
YTRKIYRRSKRNRKTRYRQARFL

SEQ ID NO: 412 - protein, 13 aa, Alicyclobacillus sp.
NPDLHIEVGKFDM

SEQ ID NO: 413 - protein, 15 aa, Alicyclobacillus sp.
KGHFMDAIAISGIKP

SEQ ID NO: 414 - protein, 18 aa, Alicyclobacillus sp.
KVSLGVDTGQRHIGFAIV

SEQ ID NO: 415 - protein, 23 aa, Alicyclobacillus sp.
YTRKIYRRSKRNRKTRYRQARFL

SEQ ID NO: 416 - protein, 13 aa, Alicyclobacillus sp.
NPDLHIEVGKFDM

SEQ ID NO: 417 - protein, 15 aa, Alicyclobacillus sp.
KGHFMDAIAISGIKP

SEQ ID NO: 418 - protein, 18 aa, Alicyclobacillus sp.
KVSLGVDTGQRHIGFAIV

SEQ ID NO: 419 - protein, 23 aa, Alicyclobacillus sp.
YTRKIYRRSKRNRKTRYRQARFL

SEQ ID NO: 420 - protein, 13 aa, Alicyclobacillus sp.
NPDLHIEVGKFDM

SEQ ID NO: 421 - protein, 15 aa, Alicyclobacillus sp.
KGHFMDAIAISGIKP

SEQ ID NO: 422 - protein, 18 aa, Alicyclobacillus sp.
KVSLGVDTGQRHIGFAIV

SEQ ID NO: 423 - protein, 23 aa, Alicyclobacillus sp.
YTRKIYRRSKRNRKTRYRQARFL

SEQ ID NO: 424 - protein, 13 aa, Alicyclobacillus sp.
NPDLHIEVGKFDM

SEQ ID NO: 425 - protein, 15 aa, Alicyclobacillus sp.
KGHFMDAIAISGIKP

SEQ ID NO: 426 - protein, 18 aa, Alicyclobacillus sp.
MVVAGIDPGITHLGLGVV

SEQ ID NO: 427 - protein, 13 aa, Alicyclobacillus sp.
PEAVAVEEQFFYR

SEQ ID NO: 428 - protein, 15 aa, Lactococcus lactis
PSHLADALAIALTHA

SEQ ID NO: 429 - protein, 10 aa, Lactococcus lactis
FLVNHNYYSF

SEQ ID NO: 430 - protein, 16 aa, Lactococcus lactis
LQKFTGDIENLVKASL

SEQ ID NO: 431 - protein, 9 aa, Lactococcus lactis
VIVPELTFG

SEQ ID NO: 432 - protein, 15 aa, Lactococcus lactis
WIRAGWFIRNRSAHY

SEQ ID NO: 433 - protein, 13 aa, Lactococcus lactis
NKDLFAFMLSIKQ

SEQ ID NO: 434 - protein, 10 aa, Lactococcus lactis
FLVNHNYYSF

SEQ ID NO: 435 - protein, 16 aa, Lactococcus lactis
LQKFTGDIENLVKASL

SEQ ID NO: 436 - protein, 9 aa, Lactococcus lactis
VIVPELTFG

SEQ ID NO: 437 - protein, 15 aa, Lactococcus lactis
WIRAGWFIRNRSAHY

SEQ ID NO: 438 - protein, 13 aa, Lactococcus lactis
NKDLFAFMLSIKQ

SEQ ID NO: 439 - protein, 10 aa, Lactococcus lactis
FLVNHNYYSF

SEQ ID NO: 440 - protein, 16 aa, Lactococcus lactis
LQKFTGDIENLVKASL

SEQ ID NO: 441 - protein, 9 aa, Lactococcus lactis
VIVPELTFG

SEQ ID NO: 442 - protein, 15 aa, Lactococcus lactis
WIRAGWFIRNRSAHY

SEQ ID NO: 443 - protein, 13 aa, Lactococcus lactis
NKDLFAFMLSIKQ

SEQ ID NO: 444 - protein, 10 aa, Lactococcus lactis
FLVNHNYYSF

SEQ ID NO: 445 - protein, 16 aa, Lactococcus lactis
LQKFTGDIENLVKASL

SEQ ID NO: 446 - protein, 15 aa, Lactococcus lactis
WIRAGWFIRNRSAHY

SEQ ID NO: 447 - protein, 13 aa, Lactococcus lactis
NKDLFAFMLSIKQ

SEQ ID NO: 448 - protein, 10 aa, Lactococcus lactis
FLVNHNYYSF

SEQ ID NO: 449 - protein, 16 aa, Lactococcus lactis
LQKFTGDIENLVKASL

SEQ ID NO: 450 - protein, 9 aa, Lactococcus lactis
VIVPELTFG

SEQ ID NO: 451 - protein, 15 aa, Lactococcus lactis
WIRAGWFIRNRSAHY

SEQ ID NO: 452 - protein, 13 aa, Lactococcus lactis
NKDLFAFMLSIKQ

SEQ ID NO: 453 - protein, 10 aa, Lactococcus lactis
FLVNHNYYSF

SEQ ID NO: 454 - protein, 16 aa, Lactococcus lactis
LQKFTGDIENLVKASL

SEQ ID NO: 455 - protein, 9 aa, Lactococcus lactis
VIVPELTFG

SEQ ID NO: 456 - protein, 15 aa, Lactococcus lactis
WIRAGWFIRNRSAHY

SEQ ID NO: 457 - protein, 13 aa, Lactococcus lactis
NKDLFAFMLSIKQ

SEQ ID NO: 458 - protein, 10 aa, Lactococcus lactis
FLVNHNYYSF

SEQ ID NO: 459 - protein, 16 aa, Lactococcus lactis
LQKFTGDIENLVKASL

SEQ ID NO: 460 - protein, 9 aa, Lactococcus lactis
VIVPELTFG

SEQ ID NO: 461 - protein, 15 aa, Lactococcus lactis
WIRAGWFIRNRSAHY

SEQ ID NO: 462 - protein, 13 aa, Lactococcus lactis
NKDLFAFMLSIKQ

SEQ ID NO: 463 - protein, 10 aa, Lactococcus lactis
FLVNHNYYSF

SEQ ID NO: 464 - protein, 16 aa, Lactococcus lactis
LQKFTGDIENLVKASL

SEQ ID NO: 465 - protein, 9 aa, Lactococcus lactis
VIVPELTFG

SEQ ID NO: 466 - protein, 15 aa, Lactococcus lactis
WIRAGWFIRNRSAHY

SEQ ID NO: 467 - protein, 13 aa, Lactococcus lactis
NKDLFAFMLSIKQ

SEQ ID NO: 468 - protein, 16 aa, Lactococcus lactis
LQKFTGDIENLVKASL

SEQ ID NO: 469 - protein, 9 aa, Lactococcus lactis
VIVPELTFG

SEQ ID NO: 470 - protein, 15 aa, Lactococcus lactis
WIRAGWFIRNRSAHY

SEQ ID NO: 471 - protein, 13 aa, Lactococcus lactis
NKDLFAFMLSIKQ

SEQ ID NO: 472 - protein, 10 aa, Lactococcus lactis
FLVNHNYYSF

SEQ ID NO: 473 - protein, 16 aa, Lactococcus lactis
LQKFTGDIENLVKASL

SEQ ID NO: 474 - protein, 9 aa, Lactococcus lactis
VIVPELTFG

SEQ ID NO: 475 - protein, 15 aa, Lactococcus lactis
WIRAGWFIRNRSAHY

SEQ ID NO: 476 - protein, 13 aa, Lactococcus lactis
NKDLFAFMLSIKQ

SEQ ID NO: 477 - protein, 10 aa, Lactococcus lactis
FLVNHNYYSF

SEQ ID NO: 478 - protein, 16 aa, Lactococcus lactis
LQKFTGDIENLVKASL

SEQ ID NO: 479 - protein, 15 aa, Lactococcus lactis
WIRAGWFIRNRSAHY

SEQ ID NO: 480 - protein, 13 aa, Lactococcus lactis
NKDLFAFMLSIKQ

SEQ ID NO: 481 - protein, 10 aa, Lactococcus lactis
FLVNHNYYSF

SEQ ID NO: 482 - protein, 16 aa, Lactococcus lactis
LQKFTGDIENLVKASL

SEQ ID NO: 483 - protein, 15 aa, Lactococcus lactis
WIRAGWFIRNRSAHY

SEQ ID NO: 484 - protein, 13 aa, Lactococcus lactis
NKDLFAFMLSIKQ

SEQ ID NO: 485 - protein, 10 aa, Lactococcus lactis
FLVNHNYYSF

SEQ ID NO: 486 - protein, 16 aa, Lactococcus lactis
LQKFTGDIENLVKASL

SEQ ID NO: 487 - protein, 15 aa, Lactococcus lactis
WIRAGWFIRNRSAHY

SEQ ID NO: 488 - protein, 13 aa, Lactococcus lactis
NKDLFAFMLSIKQ

SEQ ID NO: 489 - protein, 10 aa, Lactococcus lactis
FLVNHNYYSF

SEQ ID NO: 490 - protein, 16 aa, Lactococcus lactis
LQKFTGDIENLVKASL

SEQ ID NO: 491 - protein, 9 aa, Lactococcus lactis
VIVPELTFG

SEQ ID NO: 492 - protein, 15 aa, Lactococcus lactis
WIRAGWFIRNRSAHY

SEQ ID NO: 493 - protein, 13 aa, Lactococcus lactis
NKDLFAFMLSIKQ

SEQ ID NO: 494 - protein, 10 aa, Lactococcus lactis
FLVNHNYYSF

SEQ ID NO: 495 - protein, 16 aa, Lactococcus lactis
LQKFTGDIENLVKASL

SEQ ID NO: 496 - protein, 9 aa, Lactococcus lactis
VIVPELTFG

SEQ ID NO: 497 - protein, 15 aa, Lactococcus lactis
WIRAGWFIRNRSAHY

SEQ ID NO: 498 - protein, 13 aa, Lactococcus lactis
NKDLFAFMLSIKQ

SEQ ID NO: 499 - protein, 10 aa, Lactococcus lactis
FLVNHNYYSF

SEQ ID NO: 500 - protein, 16 aa, Lactococcus lactis
LQKFTGDIENLVKASL

SEQ ID NO: 501 - protein, 9 aa, Lactococcus lactis
VIVPELTFG

SEQ ID NO: 502 - protein, 15 aa, Lactococcus lactis
WIRAGWFIRNRSAHY

SEQ ID NO: 503 - protein, 13 aa, Lactococcus lactis
NKDLFAFMLSIKQ

SEQ ID NO: 504 - protein, 10 aa, Lactococcus lactis
FLVNHNYYSF

SEQ ID NO: 505 - protein, 16 aa, Lactococcus lactis
LQKFTGDIENLVKASL

SEQ ID NO: 506 - protein, 9 aa, Lactococcus lactis
VIVPELTFG

SEQ ID NO: 507 - protein, 15 aa, Lactococcus lactis
WIRAGWFIRNRSAHY

SEQ ID NO: 508 - protein, 13 aa, Lactococcus lactis
NKDLFAFMLSIKQ

SEQ ID NO: 509 - protein, 10 aa, Lactococcus lactis
FLVNHNYYSF

SEQ ID NO: 510 - protein, 16 aa, Lactococcus lactis
LQKFTGDIENLVKASL

SEQ ID NO: 511 - protein, 9 aa, Lactococcus lactis
VIVPELTFG

SEQ ID NO: 512 - protein, 15 aa, Lactococcus lactis
WIRAGWFIRNRSAHY

SEQ ID NO: 513 - protein, 13 aa, Lactococcus lactis
NKDLFAFMLSIKQ

SEQ ID NO: 514 - protein, 10 aa, Lactococcus lactis
FLVNHNYYSF

SEQ ID NO: 515 - protein, 16 aa, Lactococcus lactis
LQKFTGDIENLVKASL

SEQ ID NO: 516 - protein, 9 aa, Lactococcus lactis
VIVPELTFG

SEQ ID NO: 517 - protein, 15 aa, Lactococcus lactis
WIRAGWFIRNRSAHY

SEQ ID NO: 518 - protein, 13 aa, Lactococcus lactis
NKDLFAFMLSIKQ

SEQ ID NO: 519 - protein, 10 aa, Lactococcus lactis
FLVNHNYYSF

SEQ ID NO: 520 - protein, 16 aa, Lactococcus lactis
LQKFTGDIENLVKASL

SEQ ID NO: 521 - protein, 9 aa, Lactococcus lactis
VIVPELTFG

SEQ ID NO: 522 - protein, 15 aa, Lactococcus lactis
WIRAGWFIRNRSAHY

SEQ ID NO: 523 - protein, 13 aa, Lactococcus lactis
NKDLFAFMLSIKQ

SEQ ID NO: 524 - protein, 10 aa, Lactococcus lactis
FLVNHNYYSF

SEQ ID NO: 525 - protein, 16 aa, Lactococcus lactis
LQKFTGDIENLVKASL

SEQ ID NO: 526 - protein, 9 aa, Lactococcus lactis
VIVPELTFG

SEQ ID NO: 527 - protein, 15 aa, Lactococcus lactis
WIRAGWFIRNRSAHY

SEQ ID NO: 528 - protein, 13 aa, Lactococcus lactis
NKDLFAFMLSIKQ

SEQ ID NO: 529 - protein, 10 aa, Lactococcus lactis
FLVNHNYYSF

SEQ ID NO: 530 - protein, 16 aa, Lactococcus lactis
LQKFTGDIENLVKASL

SEQ ID NO: 531 - protein, 9 aa, Lactococcus lactis
VIVPELTFG

SEQ ID NO: 532 - protein, 15 aa, Lactococcus lactis
WIRAGWFIRNRSAHY

SEQ ID NO: 533 - protein, 13 aa, Lactococcus lactis
NKDLFAFMLSIKQ

SEQ ID NO: 534 - protein, 10 aa, Lactococcus lactis
FLVNHNYYSF

SEQ ID NO: 535 - protein, 16 aa, Lactococcus lactis
LQKFTGDIENLVKASL

SEQ ID NO: 536 - protein, 15 aa, Lactococcus lactis
WIRAGWFIRNRSAHY

SEQ ID NO: 537 - protein, 13 aa, Lactococcus lactis
NKDLFAFMLSIKQ

SEQ ID NO: 538 - protein, 10 aa, Lactococcus lactis
FLVNHNYYSF

SEQ ID NO: 539 - protein, 16 aa, Lactococcus lactis
LQKFTGDIENLVKASL

SEQ ID NO: 540 - protein, 15 aa, Lactococcus lactis
WIRAGWFIRNRSAHY

SEQ ID NO: 541 - protein, 13 aa, Lactococcus lactis
NKDLFAFMLSIKQ

SEQ ID NO: 542 - protein, 10 aa, Lactococcus lactis
FLVNHNYYSF

SEQ ID NO: 543 - protein, 16 aa, Lactococcus lactis
LQKFTGDIENLVKASL

SEQ ID NO: 544 - protein, 9 aa, Lactococcus lactis
VIVPELTFG

SEQ ID NO: 545 - protein, 15 aa, Lactococcus lactis
WIRAGWFIRNRSAHY

SEQ ID NO: 546 - protein, 13 aa, Lactococcus lactis
NKDLFAFMLSIKQ

SEQ ID NO: 547 - protein, 10 aa, Lactococcus lactis
FLVNHNYYSF

SEQ ID NO: 548 - protein, 16 aa, Lactococcus lactis
LQKFTGDIENLVKASL

SEQ ID NO: 549 - protein, 9 aa, Lactococcus lactis
VIVPELTFG

SEQ ID NO: 550 - protein, 15 aa, Lactococcus lactis
WIRAGWFIRNRSAHY

SEQ ID NO: 551 - protein, 13 aa, Lactococcus lactis
NKDLFAFMLSIKQ

SEQ ID NO: 552 - protein, 10 aa, Lactococcus lactis
FLVNHNYYSF

SEQ ID NO: 553 - protein, 16 aa, Lactococcus lactis
LQKFTGDIENLVKASL

SEQ ID NO: 554 - protein, 9 aa, Lactococcus lactis
VIVPELTFG

SEQ ID NO: 555 - protein, 15 aa, Lactococcus lactis
WIRAGWFIRNRSAHY

SEQ ID NO: 556 - protein, 13 aa, Lactococcus lactis
NKDLFAFMLSIKQ

SEQ ID NO: 557 - protein, 10 aa, Lactococcus lactis
FLVNHNYYSF

SEQ ID NO: 558 - protein, 16 aa, Lactococcus lactis
LQKFTGDIENLVKASL

SEQ ID NO: 559 - protein, 9 aa, Lactococcus lactis
VIVPELTFG

SEQ ID NO: 560 - protein, 15 aa, Lactococcus lactis
WIRAGWFIRNRSAHY

SEQ ID NO: 561 - protein, 13 aa, Lactococcus lactis
NKDLFAFMLSIKQ

SEQ ID NO: 562 - protein, 10 aa, Lactococcus lactis
FLVNHNYYSF

SEQ ID NO: 563 - protein, 16 aa, Lactococcus lactis
LQKFTGDIENLVKASL

SEQ ID NO: 564 - protein, 9 aa, Lactococcus lactis
VIVPELTFG

SEQ ID NO: 565 - protein, 15 aa, Lactococcus lactis
WIRAGWFIRNRSAHY

SEQ ID NO: 566 - protein, 13 aa, Lactococcus lactis
NKDLFAFMLSIKQ

SEQ ID NO: 567 - protein, 10 aa, Lactococcus lactis
FLVNHNYYSF

SEQ ID NO: 568 - protein, 16 aa, Lactococcus lactis
LQKFTGDIENLVKASL

SEQ ID NO: 569 - protein, 9 aa, Lactococcus lactis
VIVPELTFG

SEQ ID NO: 570 - protein, 15 aa, Lactococcus lactis
WIRAGWFIRNRSAHY

SEQ ID NO: 571 - protein, 13 aa, Lactococcus lactis
NKDLFAFMLSIKQ

SEQ ID NO: 572 - protein, 10 aa, Lactococcus lactis
FLVNHNYYSF

SEQ ID NO: 573 - protein, 16 aa, Lactococcus lactis
LQKFTGDIENLVKASL

SEQ ID NO: 574 - protein, 9 aa, Lactococcus lactis
VIVPELTFG

SEQ ID NO: 575 - protein, 15 aa, Lactococcus lactis
WIRAGWFIRNRSAHY

SEQ ID NO: 576 - protein, 13 aa, Lactococcus lactis
NKDLFAFMLSIKQ

SEQ ID NO: 577 - protein, 10 aa, Lactococcus lactis
FLVNHNYYSF

SEQ ID NO: 578 - protein, 16 aa, Lactococcus lactis
LQKFTGDIENLVKASL

SEQ ID NO: 579 - protein, 9 aa, Lactococcus lactis
VIVPELTFG

SEQ ID NO: 580 - protein, 15 aa, Lactococcus lactis
WIRAGWFIRNRSAHY

SEQ ID NO: 581 - protein, 13 aa, Lactococcus lactis
NKDLFAFMLSIKQ

SEQ ID NO: 582 - protein, 10 aa, Lactococcus lactis
FLVNHNYYSF

SEQ ID NO: 583 - protein, 16 aa, Lactococcus lactis
LQKFTGDIENLVKASL

SEQ ID NO: 584 - protein, 9 aa, Lactococcus lactis
VIVPELTFG

SEQ ID NO: 585 - protein, 15 aa, Lactococcus lactis
WIRAGWFIRNRSAHY

SEQ ID NO: 586 - protein, 13 aa, Lactococcus lactis
NKDLFAFMLSIKQ

SEQ ID NO: 587 - protein, 16 aa, Lactococcus lactis
LQKFTGDIENLVKASL

SEQ ID NO: 588 - protein, 9 aa, Lactococcus lactis
VIVPELTFG

SEQ ID NO: 589 - protein, 15 aa, Lactococcus lactis
WIRAGWFIRNRSAHY

SEQ ID NO: 590 - protein, 13 aa, Lactococcus lactis
NKDLFAFMLSIKQ

SEQ ID NO: 591 - protein, 16 aa, Lactococcus lactis
LQKFTGDIENLVKASL

SEQ ID NO: 592 - protein, 9 aa, Lactococcus lactis
VIVPELTFG

SEQ ID NO: 593 - protein, 15 aa, Lactococcus lactis
WIRAGWFIRNRSAHY

SEQ ID NO: 594 - protein, 13 aa, Lactococcus lactis
NKDLFAFMLSIKQ

SEQ ID NO: 595 - protein, 16 aa, Lactococcus lactis
LQKFTGDIENLVKASL

SEQ ID NO: 596 - protein, 9 aa, Lactococcus lactis
VIVPELTFG

SEQ ID NO: 597 - protein, 15 aa, Lactococcus lactis
WIRAGWFIRNRSAHY

SEQ ID NO: 598 - protein, 13 aa, Lactococcus lactis
NKDLFAFMLSIKQ

SEQ ID NO: 599 - protein, 10 aa, Lactococcus lactis
FLVNHNYYSF

SEQ ID NO: 600 - protein, 16 aa, Lactococcus lactis
LQKFTGDIENLVKASL

SEQ ID NO: 601 - protein, 9 aa, Lactococcus lactis
VIVPELTFG

SEQ ID NO: 602 - protein, 15 aa, Lactococcus lactis
WIRAGWFIRNRSAHY

SEQ ID NO: 603 - protein, 13 aa, Lactococcus lactis
NKDLFAFMLSIKQ

SEQ ID NO: 604 - protein, 10 aa, Lactococcus lactis
FLVNHNYYSF

SEQ ID NO: 605 - protein, 16 aa, Lactococcus lactis
LQKFTGDIENLVKASL

SEQ ID NO: 606 - protein, 9 aa, Lactococcus lactis
VIVPELTFG

SEQ ID NO: 607 - protein, 15 aa, Lactococcus lactis
WIRAGWFIRNRSAHY

SEQ ID NO: 608 - protein, 13 aa, Lactococcus lactis
NKDLFAFMLSIKQ

SEQ ID NO: 609 - protein, 10 aa, Lactococcus lactis
FLVNHNYYSF

SEQ ID NO: 610 - protein, 16 aa, Lactococcus lactis
LQKFTGDIENLVKASL

SEQ ID NO: 611 - protein, 9 aa, Lactococcus lactis
VIVPELTFG

SEQ ID NO: 612 - protein, 15 aa, Lactococcus lactis
WIRAGWFIRNRSAHY

SEQ ID NO: 613 - protein, 13 aa, Lactococcus lactis
NKDLFAFMLSIKQ

SEQ ID NO: 614 - protein, 10 aa, Lactococcus lactis
FLVNHNYYSF

SEQ ID NO: 615 - protein, 16 aa, Lactococcus lactis
LQKFTGDIENLVKASL

SEQ ID NO: 616 - protein, 9 aa, Lactococcus lactis
VIVPELTFG

SEQ ID NO: 617 - protein, 15 aa, Lactococcus lactis
WIRAGWFIRNRSAHY

SEQ ID NO: 618 - protein, 13 aa, Lactococcus lactis
NKDLFAFMLSIKQ

SEQ ID NO: 619 - protein, 10 aa, Lactococcus lactis
FLVNHNYYSF

SEQ ID NO: 620 - protein, 16 aa, Lactococcus lactis
LQKFTGDIENLVKASL

SEQ ID NO: 621 - protein, 9 aa, Lactococcus lactis
VIVPELTFG

SEQ ID NO: 622 - protein, 15 aa, Lactococcus lactis
WIRAGWFIRNRSAHY

SEQ ID NO: 623 - protein, 13 aa, Lactococcus lactis
NKDLFAFMLSIKQ

SEQ ID NO: 624 - protein, 10 aa, Lactococcus lactis
FLVNHNYYSF

SEQ ID NO: 625 - protein, 16 aa, Lactococcus lactis
LQKFTGDIENLVKASL

SEQ ID NO: 626 - protein, 9 aa, Lactococcus lactis
VIVPELTFG

SEQ ID NO: 627 - protein, 15 aa, Lactococcus lactis
WIRAGWFIRNRSAHY

SEQ ID NO: 628 - protein, 13 aa, Lactococcus lactis
NKDLFAFMLSIKQ

SEQ ID NO: 629 - protein, 10 aa, Lactococcus lactis
FLVNHNYYSF

SEQ ID NO: 630 - protein, 16 aa, Lactococcus lactis
LQKFTGDIENLVKASL

SEQ ID NO: 631 - protein, 9 aa, Lactococcus lactis
VIVPELTFG

SEQ ID NO: 632 - protein, 15 aa, Lactococcus lactis
WIRAGWFIRNRSAHY

SEQ ID NO: 633 - protein, 13 aa, Lactococcus lactis
NKDLFAFMLSIKQ

SEQ ID NO: 634 - protein, 10 aa, Lactococcus lactis
FLVNHNYYSF

SEQ ID NO: 635 - protein, 16 aa, Lactococcus lactis
LQKFTGDIENLVKASL

SEQ ID NO: 636 - protein, 9 aa, Lactococcus lactis
VIVPELTFG

SEQ ID NO: 637 - protein, 15 aa, Lactococcus lactis
WIRAGWFIRNRSAHY

SEQ ID NO: 638 - protein, 13 aa, Lactococcus lactis
NKDLFAFMLSIKQ

SEQ ID NO: 639 - protein, 10 aa, Lactococcus lactis
FLVNHNYYSF

SEQ ID NO: 640 - protein, 16 aa, Lactococcus lactis
LQKFTGDIENLVKASL

SEQ ID NO: 641 - protein, 9 aa, Lactococcus lactis
VIVPELTFG

SEQ ID NO: 642 - protein, 15 aa, Lactococcus lactis
WIRAGWFIRNRSAHY

SEQ ID NO: 643 - protein, 13 aa, Lactococcus lactis
NKDLFAFMLSIKQ

SEQ ID NO: 644 - protein, 10 aa, Lactococcus lactis
FLVNHNYYSF

SEQ ID NO: 645 - protein, 16 aa, Lactococcus lactis
LQKFTGDIENLVKASL

SEQ ID NO: 646 - protein, 9 aa, Lactococcus lactis
VIVPELTFG

SEQ ID NO: 647 - protein, 15 aa, Lactococcus lactis
WIRAGWFIRNRSAHY

SEQ ID NO: 648 - protein, 13 aa, Lactococcus lactis
NKDLFAFMLSIKQ

SEQ ID NO: 649 - protein, 10 aa, Lactococcus lactis
FLVNHNYYSF

SEQ ID NO: 650 - protein, 16 aa, Lactococcus lactis
LQKFTGDIENLVKASL

SEQ ID NO: 651 - protein, 9 aa, Lactococcus lactis
VIVPELTFG

SEQ ID NO: 652 - protein, 15 aa, Lactococcus lactis
WIRAGWFIRNRSAHY

SEQ ID NO: 653 - protein, 13 aa, Lactococcus lactis
NKDLFAFMLSIKQ

SEQ ID NO: 654 - protein, 10 aa, Lactococcus lactis
FLVNHNYYSF

SEQ ID NO: 655 - protein, 16 aa, Lactococcus lactis
LQKFTGDIENLVKASL

SEQ ID NO: 656 - protein, 9 aa, Lactococcus lactis
VIVPELTFG

SEQ ID NO: 657 - protein, 15 aa, Lactococcus lactis
WIRAGWFIRNRSAHY

SEQ ID NO: 658 - protein, 13 aa, Lactococcus lactis
NKDLFAFMLSIKQ

SEQ ID NO: 659 - protein, 10 aa, Lactococcus lactis
FLVNHNYYSF

SEQ ID NO: 660 - protein, 16 aa, Lactococcus lactis
LQKFTGDIENLVKASL

SEQ ID NO: 661 - protein, 9 aa, Lactococcus lactis
VIVPELTFG

SEQ ID NO: 662 - protein, 15 aa, Lactococcus lactis
WIRAGWFIRNRSAHY

SEQ ID NO: 663 - protein, 13 aa, Lactococcus lactis
NKDLFAFMLSIKQ

SEQ ID NO: 664 - protein, 10 aa, Lactococcus lactis
FLVNHNYYSF

SEQ ID NO: 665 - protein, 16 aa, Lactococcus lactis
LQKFTGDIENLVKASL

SEQ ID NO: 666 - protein, 9 aa, Lactococcus lactis
VIVPELTFG

SEQ ID NO: 667 - protein, 15 aa, Lactococcus lactis
WIRAGWFIRNRSAHY

SEQ ID NO: 668 - protein, 13 aa, Lactococcus lactis
NKDLFAFMLSIKQ

SEQ ID NO: 669 - protein, 10 aa, Lactococcus lactis
FLVNHNYYSF

SEQ ID NO: 670 - protein, 16 aa, Lactococcus lactis
LQKFTGDIENLVKASL

SEQ ID NO: 671 - protein, 9 aa, Lactococcus lactis
VIVPELTFG

SEQ ID NO: 672 - protein, 15 aa, Lactococcus lactis
WIRAGWFIRNRSAHY

SEQ ID NO: 673 - protein, 13 aa, Lactococcus lactis
NKDLFAFMLSIKQ

SEQ ID NO: 674 - protein, 10 aa, Lactococcus lactis
FLVNHNYYSF

SEQ ID NO: 675 - protein, 16 aa, Lactococcus lactis
LQKFTGDIENLVKASL

SEQ ID NO: 676 - protein, 9 aa, Lactococcus lactis
VIVPELTFG

SEQ ID NO: 677 - protein, 15 aa, Lactococcus lactis
WIRAGWFIRNRSAHY

SEQ ID NO: 678 - protein, 13 aa, Lactococcus lactis
NKDLFAFMLSIKQ

SEQ ID NO: 679 - protein, 10 aa, Lactococcus lactis
FLVNHNYYSF

SEQ ID NO: 680 - protein, 16 aa, Lactococcus lactis
LQKFTGDIENLVKASL

SEQ ID NO: 681 - protein, 9 aa, Lactococcus lactis
VIVPELTFG

SEQ ID NO: 682 - protein, 15 aa, Lactococcus lactis
WIRAGWFIRNRSAHY

SEQ ID NO: 683 - protein, 13 aa, Lactococcus lactis
NKDLFAFMLSIKQ

SEQ ID NO: 684 - protein, 10 aa, Lactococcus lactis
FLVNHNYYSF

SEQ ID NO: 685 - protein, 16 aa, Lactococcus lactis
LQKFTGDIENLVKASL

SEQ ID NO: 686 - protein, 15 aa, Lactococcus lactis
WIRAGWFIRNRSAHY

SEQ ID NO: 687 - protein, 13 aa, Lactococcus lactis
NKDLFAFMLSIKQ

SEQ ID NO: 688 - protein, 10 aa, Lactococcus lactis
FLVNHNYYSF

SEQ ID NO: 689 - protein, 16 aa, Lactococcus lactis
LQKFTGDIENLVKASL

SEQ ID NO: 690 - protein, 15 aa, Lactococcus lactis
WIRAGWFIRNRSAHY

SEQ ID NO: 691 - protein, 13 aa, Lactococcus lactis
NKDLFAFMLSIKQ

SEQ ID NO: 692 - protein, 10 aa, Lactococcus lactis
FLVNHNYYSF

SEQ ID NO: 693 - protein, 16 aa, Lactococcus lactis
LQKFTGDIENLVKASL

SEQ ID NO: 694 - protein, 15 aa, Lactococcus lactis
WIRAGWFIRNRSAHY

SEQ ID NO: 695 - protein, 13 aa, Lactococcus lactis
NKDLFAFMLSIKQ

SEQ ID NO: 696 - protein, 10 aa, Lactococcus lactis
FLVNHNYYSF

SEQ ID NO: 697 - protein, 16 aa, Lactococcus lactis
LQKFTGDIENLVKASL

SEQ ID NO: 698 - protein, 15 aa, Lactococcus lactis
WIRAGWFIRNRSAHY

SEQ ID NO: 699 - protein, 13 aa, Lactococcus lactis
NKDLFAFMLSIKQ

SEQ ID NO: 700 - protein, 10 aa, Lactococcus lactis
FLVNHNYYSF

SEQ ID NO: 701 - protein, 16 aa, Lactococcus lactis
LQKFTGDIENLVKASL

SEQ ID NO: 702 - protein, 9 aa, Lactococcus lactis
VIVPELTFG

SEQ ID NO: 703 - protein, 15 aa, Lactococcus lactis
WIRAGWFIRNRSAHY

SEQ ID NO: 704 - protein, 13 aa, Lactococcus lactis
NKDLFAFMLSIKQ

SEQ ID NO: 705 - protein, 10 aa, Lactococcus lactis
FLVNHNYYSF

SEQ ID NO: 706 - protein, 16 aa, Lactococcus lactis
LQKFTGDIENLVKASL

SEQ ID NO: 707 - protein, 9 aa, Lactococcus lactis
VIVPELTFG

SEQ ID NO: 708 - protein, 15 aa, Lactococcus lactis
WIRAGWFIRNRSAHY

SEQ ID NO: 709 - protein, 13 aa, Lactococcus lactis
NKDLFAFMLSIKQ

SEQ ID NO: 710 - protein, 10 aa, Lactococcus lactis
FLVNHNYYSF

SEQ ID NO: 711 - protein, 16 aa, Lactococcus lactis
LQKFTGDIENLVKASL

SEQ ID NO: 712 - protein, 9 aa, Lactococcus lactis
VIVPELTFG

SEQ ID NO: 713 - protein, 15 aa, Lactococcus lactis
WIRAGWFIRNRSAHY

SEQ ID NO: 714 - protein, 13 aa, Lactococcus lactis
NKDLFAFMLSIKQ

SEQ ID NO: 715 - protein, 10 aa, Lactococcus lactis
FLVNHNYYSF

SEQ ID NO: 716 - protein, 16 aa, Lactococcus lactis
LQKFTGDIENLVKASL

SEQ ID NO: 717 - protein, 9 aa, Lactococcus lactis
VIVPELTFG

SEQ ID NO: 718 - protein, 15 aa, Lactococcus lactis
WIRAGWFIRNRSAHY

SEQ ID NO: 719 - protein, 13 aa, Lactococcus lactis
NKDLFAFMLSIKQ

SEQ ID NO: 720 - protein, 10 aa, Lactococcus lactis
FLVNHNYYSF

SEQ ID NO: 721 - protein, 16 aa, Lactococcus lactis
LQKFTGDIENLVKASL

SEQ ID NO: 722 - protein, 9 aa, Lactococcus lactis
VIVPELTFG

SEQ ID NO: 723 - protein, 15 aa, Lactococcus lactis
WIRAGWFIRNRSAHY

SEQ ID NO: 724 - protein, 13 aa, Lactococcus lactis
NKDLFAFMLSIKQ

SEQ ID NO: 725 - protein, 10 aa, Lactococcus lactis
FLVNHNYYSF

SEQ ID NO: 726 - protein, 16 aa, Lactococcus lactis
LQKFTGDIENLVKASL

SEQ ID NO: 727 - protein, 9 aa, Lactococcus lactis
VIVPELTFG

SEQ ID NO: 728 - protein, 15 aa, Lactococcus lactis
WIRAGWFIRNRSAHY

SEQ ID NO: 729 - protein, 13 aa, Lactococcus lactis
NKDLFAFMLSIKQ

SEQ ID NO: 730 - protein, 10 aa, Lactococcus lactis
FLVNHNYYSF

SEQ ID NO: 731 - protein, 16 aa, Lactococcus lactis
LQKFTGDIENLVKASL

SEQ ID NO: 732 - protein, 9 aa, Lactococcus lactis
VIVPELTFG

SEQ ID NO: 733 - protein, 15 aa, Lactococcus lactis
WIRAGWFIRNRSAHY

SEQ ID NO: 734 - protein, 13 aa, Lactococcus lactis
NKDLFAFMLSIKQ

SEQ ID NO: 735 - protein, 10 aa, Lactococcus lactis
FLVNHNYYSF

SEQ ID NO: 736 - protein, 16 aa, Lactococcus lactis
LQKFTGDIENLVKASL

SEQ ID NO: 737 - protein, 9 aa, Lactococcus lactis
VIVPELTFG

SEQ ID NO: 738 - protein, 15 aa, Lactococcus lactis
WIRAGWFIRNRSAHY

SEQ ID NO: 739 - protein, 13 aa, Lactococcus lactis
NKDLFAFMLSIKQ

SEQ ID NO: 740 - protein, 10 aa, Lactococcus lactis
FLVNHNYYSF

SEQ ID NO: 741 - protein, 16 aa, Lactococcus lactis
LQKFTGDIENLVKASL

SEQ ID NO: 742 - protein, 9 aa, Lactococcus lactis
VIVPELTFG

SEQ ID NO: 743 - protein, 15 aa, Lactococcus lactis
WIRAGWFIRNRSAHY

SEQ ID NO: 744 - protein, 13 aa, Lactococcus lactis
NKDLFAFMLSIKQ

SEQ ID NO: 745 - protein, 10 aa, Lactococcus lactis
FLVNHNYYSF

SEQ ID NO: 746 - protein, 16 aa, Lactococcus lactis
LQKFTGDIENLVKASL

SEQ ID NO: 747 - protein, 9 aa, Lactococcus lactis
VIVPELTFG

SEQ ID NO: 748 - protein, 15 aa, Lactococcus lactis
WIRAGWFIRNRSAHY

SEQ ID NO: 749 - protein, 13 aa, Lactococcus lactis
NKDLFAFMLSIKQ

SEQ ID NO: 750 - protein, 10 aa, Lactococcus lactis
FLVNHNYYSF

SEQ ID NO: 751 - protein, 16 aa, Lactococcus lactis
LQKFTGDIENLVKASL

SEQ ID NO: 752 - protein, 9 aa, Lactococcus lactis
VIVPELTFG

SEQ ID NO: 753 - protein, 15 aa, Lactococcus lactis
WIRAGWFIRNRSAHY

SEQ ID NO: 754 - protein, 13 aa, Lactococcus lactis
NKDLFAFMLSIKQ

SEQ ID NO: 755 - protein, 10 aa, Lactococcus lactis
FLVNHNYYSF

SEQ ID NO: 756 - protein, 16 aa, Lactococcus lactis
LQKFTGDIENLVKASL

SEQ ID NO: 757 - protein, 9 aa, Lactococcus lactis
VIVPELTFG

SEQ ID NO: 758 - protein, 15 aa, Lactococcus lactis
WIRAGWFIRNRSAHY

SEQ ID NO: 759 - protein, 13 aa, Lactococcus lactis
NKDLFAFMLSIKQ

SEQ ID NO: 760 - protein, 10 aa, Lactococcus lactis
FLVNHNYYSF

SEQ ID NO: 761 - protein, 16 aa, Lactococcus lactis
LQKFTGDIENLVKASL

SEQ ID NO: 762 - protein, 9 aa, Lactococcus lactis
VIVPELTFG

SEQ ID NO: 763 - protein, 15 aa, Lactococcus lactis
WIRAGWFIRNRSAHY

SEQ ID NO: 764 - protein, 13 aa, Lactococcus lactis
NKDLFAFMLSIKQ

SEQ ID NO: 765 - protein, 10 aa, Lactococcus lactis
FLVNHNYYSF

SEQ ID NO: 766 - protein, 16 aa, Lactococcus lactis
LQKFTGDIENLVKASL

SEQ ID NO: 767 - protein, 9 aa, Lactococcus lactis
VIVPELTFG

SEQ ID NO: 768 - protein, 15 aa, Lactococcus lactis
WIRAGWFIRNRSAHY

SEQ ID NO: 769 - protein, 13 aa, Lactococcus lactis
NKDLFAFMLSIKQ

SEQ ID NO: 770 - protein, 10 aa, Lactococcus lactis
FLVNHNYYSF

SEQ ID NO: 771 - protein, 16 aa, Lactococcus lactis
LQKFTGDIENLVKASL

SEQ ID NO: 772 - protein, 15 aa, Lactococcus lactis
WIRAGWFIRNRSAHY

SEQ ID NO: 773 - protein, 13 aa, Lactococcus lactis
NKDLFAFMLSIKQ

SEQ ID NO: 774 - protein, 10 aa, Lactococcus lactis
FLVNHNYYSF

SEQ ID NO: 775 - protein, 16 aa, Lactococcus lactis
LQKFTGDIENLVKASL

SEQ ID NO: 776 - protein, 9 aa, Lactococcus lactis
VIVPELTFG

SEQ ID NO: 777 - protein, 15 aa, Lactococcus lactis
WIRAGWFIRNRSAHY

SEQ ID NO: 778 - protein, 13 aa, Lactococcus lactis
NKDLFAFMLSIKQ

SEQ ID NO: 779 - protein, 10 aa, Lactococcus lactis
FLVNHNYYSF

SEQ ID NO: 780 - protein, 16 aa, Lactococcus lactis
LQKFTGDIENLVKASL

SEQ ID NO: 781 - protein, 9 aa, Lactococcus lactis
VIVPELTFG

SEQ ID NO: 782 - protein, 15 aa, Lactococcus lactis
WIRAGWFIRNRSAHY

SEQ ID NO: 783 - protein, 13 aa, Lactococcus lactis
NKDLFAFMLSIKQ

SEQ ID NO: 784 - protein, 10 aa, Lactococcus lactis
FLVNHNYYSF

SEQ ID NO: 785 - protein, 16 aa, Lactococcus lactis
LQKFTGDIENLVKASL

SEQ ID NO: 786 - protein, 9 aa, Lactococcus lactis
VIVPELTFG

SEQ ID NO: 787 - protein, 15 aa, Lactococcus lactis
WIRAGWFIRNRSAHY

SEQ ID NO: 788 - protein, 13 aa, Lactococcus lactis
NKDLFAFMLSIKQ

SEQ ID NO: 789 - protein, 10 aa, Lactococcus lactis
FLVNHNYYSF

SEQ ID NO: 790 - protein, 16 aa, Lactococcus lactis
LQKFTGDIENLVKASL

SEQ ID NO: 791 - protein, 9 aa, Lactococcus lactis
VIVPELTFG

SEQ ID NO: 792 - protein, 15 aa, Lactococcus lactis
WIRAGWFIRNRSAHY

SEQ ID NO: 793 - protein, 13 aa, Lactococcus lactis
NKDLFAFMLSIKQ

SEQ ID NO: 794 - protein, 10 aa, Lactococcus lactis
FLVNHNYYSF

SEQ ID NO: 795 - protein, 16 aa, Lactococcus lactis
LQKFTGDIENLVKASL

SEQ ID NO: 796 - protein, 9 aa, Lactococcus lactis
VIVPELTFG

SEQ ID NO: 797 - protein, 15 aa, Lactococcus lactis
WIRAGWFIRNRSAHY

SEQ ID NO: 798 - protein, 13 aa, Lactococcus lactis
NKDLFAFMLSIKQ

SEQ ID NO: 799 - protein, 10 aa, Lactococcus lactis
FLVNHNYYSF

SEQ ID NO: 800 - protein, 16 aa, Lactococcus lactis
LQKFTGDIENLVKASL

SEQ ID NO: 801 - protein, 9 aa, Lactococcus lactis
VIVPELTFG

SEQ ID NO: 802 - protein, 15 aa, Lactococcus lactis
WIRAGWFIRNRSAHY

SEQ ID NO: 803 - protein, 13 aa, Lactococcus lactis
NKDLFAFMLSIKQ

SEQ ID NO: 804 - protein, 10 aa, Lactococcus lactis
FLVNHNYYSF

SEQ ID NO: 805 - protein, 16 aa, Lactococcus lactis
LQKFTGDIENLVKASL

SEQ ID NO: 806 - protein, 9 aa, Lactococcus lactis
VIVPELTFG

SEQ ID NO: 807 - protein, 15 aa, Lactococcus lactis
WIRAGWFIRNRSAHY

SEQ ID NO: 808 - protein, 13 aa, Lactococcus lactis
NKDLFAFMLSIKQ

SEQ ID NO: 809 - protein, 10 aa, Lactococcus lactis
FLVNHNYYSF

SEQ ID NO: 810 - protein, 16 aa, Lactococcus lactis
LQKFTGDIENLVKASL

SEQ ID NO: 811 - protein, 9 aa, Lactococcus lactis
VIVPELTFG

SEQ ID NO: 812 - protein, 15 aa, Lactococcus lactis
WIRAGWFIRNRSAHY

SEQ ID NO: 813 - protein, 13 aa, Lactococcus lactis
NKDLFAFMLSIKQ

SEQ ID NO: 814 - protein, 10 aa, Lactococcus lactis
FLVNHNYYSF

SEQ ID NO: 815 - protein, 16 aa, Lactococcus lactis
LQKFTGDIENLVKASL

SEQ ID NO: 816 - protein, 9 aa, Lactococcus lactis
VIVPELTFG

SEQ ID NO: 817 - protein, 15 aa, Lactococcus lactis
WIRAGWFIRNRSAHY

SEQ ID NO: 818 - protein, 13 aa, Lactococcus lactis
NKDLFAFMLSIKQ

SEQ ID NO: 819 - protein, 10 aa, Lactococcus lactis
FLVNHNYYSF

SEQ ID NO: 820 - protein, 16 aa, Lactococcus lactis
LQKFTGDIENLVKASL

SEQ ID NO: 821 - protein, 9 aa, Lactococcus lactis
VIVPELTFG

SEQ ID NO: 822 - protein, 15 aa, Lactococcus lactis
WIRAGWFIRNRSAHY

SEQ ID NO: 823 - protein, 13 aa, Lactococcus lactis
NKDLFAFMLSIKQ

SEQ ID NO: 824 - protein, 10 aa, Lactococcus lactis
FLVNHNYYSF

SEQ ID NO: 825 - protein, 16 aa, Lactococcus lactis
LQKFTGDIENLVKASL

SEQ ID NO: 826 - protein, 9 aa, Lactococcus lactis
VIVPELTFG

SEQ ID NO: 827 - protein, 15 aa, Lactococcus lactis
WIRAGWFIRNRSAHY

SEQ ID NO: 828 - protein, 13 aa, Lactococcus lactis
NKDLFAFMLSIKQ

SEQ ID NO: 829 - protein, 10 aa, Lactococcus lactis
FLVNHNYYSF

SEQ ID NO: 830 - protein, 16 aa, Lactococcus lactis
LQKFTGDIENLVKASL

SEQ ID NO: 831 - protein, 9 aa, Lactococcus lactis
VIVPELTFG

SEQ ID NO: 832 - protein, 15 aa, Lactococcus lactis
WIRAGWFIRNRSAHY

SEQ ID NO: 833 - protein, 13 aa, Lactococcus lactis
NKDLFAFMLSIKQ

SEQ ID NO: 834 - protein, 10 aa, Lactococcus lactis
FLVNHNYYSF

SEQ ID NO: 835 - protein, 16 aa, Lactococcus lactis
LQKFTGDIENLVKASL

SEQ ID NO: 836 - protein, 9 aa, Lactococcus lactis
VIVPELTFG

SEQ ID NO: 837 - protein, 15 aa, Lactococcus lactis
WIRAGWFIRNRSAHY

SEQ ID NO: 838 - protein, 13 aa, Lactococcus lactis
NKDLFAFMLSIKQ

SEQ ID NO: 839 - protein, 10 aa, Lactococcus lactis
FLVNHNYYSF

SEQ ID NO: 840 - protein, 16 aa, Lactococcus lactis
LQKFTGDIENLVKASL

SEQ ID NO: 841 - protein, 9 aa, Lactococcus lactis
VIVPELTFG

SEQ ID NO: 842 - protein, 15 aa, Lactococcus lactis
WIRAGWFIRNRSAHY

SEQ ID NO: 843 - protein, 13 aa, Lactococcus lactis
NKDLFAFMLSIKQ

SEQ ID NO: 844 - protein, 10 aa, Lactococcus lactis
FLVNHNYYSF

SEQ ID NO: 845 - protein, 16 aa, Lactococcus lactis
LQKFTGDIENLVKASL

SEQ ID NO: 846 - protein, 9 aa, Lactococcus lactis
VIVPELTFG

SEQ ID NO: 847 - protein, 15 aa, Lactococcus lactis
WIRAGWFIRNRSAHY

SEQ ID NO: 848 - protein, 13 aa, Lactococcus lactis
NKDLFAFMLSIKQ

SEQ ID NO: 849 - protein, 10 aa, Lactococcus lactis
FLVNHNYYSF

SEQ ID NO: 850 - protein, 16 aa, Lactococcus lactis
LQKFTGDIENLVKASL

SEQ ID NO: 851 - protein, 9 aa, Lactococcus lactis
VIVPELTFG

SEQ ID NO: 852 - protein, 15 aa, Lactococcus lactis
WIRAGWFIRNRSAHY

SEQ ID NO: 853 - protein, 13 aa, Lactococcus lactis
NKDLFAFMLSIKQ

SEQ ID NO: 854 - protein, 10 aa, Lactococcus lactis
FLVNHNYYSF

SEQ ID NO: 855 - protein, 16 aa, Lactococcus lactis
LQKFTGDIENLVKASL

SEQ ID NO: 856 - protein, 9 aa, Lactococcus lactis
VIVPELTFG

SEQ ID NO: 857 - protein, 15 aa, Lactococcus lactis
WIRAGWFIRNRSAHY

SEQ ID NO: 858 - protein, 13 aa, Lactococcus lactis
NKDLFAFMLSIKQ

SEQ ID NO: 859 - protein, 10 aa, Lactococcus lactis
FLVNHNYYSF

SEQ ID NO: 860 - protein, 16 aa, Lactococcus lactis
LQKFTGDIENLVKASL

SEQ ID NO: 861 - protein, 9 aa, Lactococcus lactis
VIVPELTFG

SEQ ID NO: 862 - protein, 15 aa, Lactococcus lactis
WIRAGWFIRNRSAHY

SEQ ID NO: 863 - protein, 13 aa, Lactococcus lactis
NKDLFAFMLSIKQ

SEQ ID NO: 864 - protein, 10 aa, Lactococcus lactis
FLVNHNYYSF

SEQ ID NO: 865 - protein, 16 aa, Lactococcus lactis
LQKFTGDIENLVKASL

SEQ ID NO: 866 - protein, 9 aa, Lactococcus lactis
VIVPELTFG

SEQ ID NO: 867 - protein, 15 aa, Lactococcus lactis
WIRAGWFIRNRSAHY

SEQ ID NO: 868 - protein, 13 aa, Lactococcus lactis
NKDLFAFMLSIKQ

SEQ ID NO: 869 - protein, 10 aa, Lactococcus lactis
FLVNHNYYSF

SEQ ID NO: 870 - protein, 16 aa, Lactococcus lactis
LQKFTGDIENLVKASL

SEQ ID NO: 871 - protein, 9 aa, Lactococcus lactis
VIVPELTFG

SEQ ID NO: 872 - protein, 15 aa, Lactococcus lactis
WIRAGWFIRNRSAHY

SEQ ID NO: 873 - protein, 13 aa, Lactococcus lactis
NKDLFAFMLSIKQ

SEQ ID NO: 874 - protein, 10 aa, Lactococcus lactis
FLVNHNYYSF

SEQ ID NO: 875 - protein, 16 aa, Lactococcus lactis
LQKFTGDIENLVKASL

SEQ ID NO: 876 - protein, 9 aa, Lactococcus lactis
VIVPELTFG

SEQ ID NO: 877 - protein, 15 aa, Lactococcus lactis
WIRAGWFIRNRSAHY

SEQ ID NO: 878 - protein, 13 aa, Lactococcus lactis
NKDLFAFMLSIKQ

SEQ ID NO: 879 - protein, 10 aa, Lactococcus lactis
FLVNHNYYSF

SEQ ID NO: 880 - protein, 16 aa, Lactococcus lactis
LQKFTGDIENLVKASL

SEQ ID NO: 881 - protein, 9 aa, Lactococcus lactis
VIVPELTFG

SEQ ID NO: 882 - protein, 15 aa, Lactococcus lactis
WIRAGWFIRNRSAHY

SEQ ID NO: 883 - protein, 13 aa, Lactococcus lactis
NKDLFAFMLSIKQ

SEQ ID NO: 884 - protein, 10 aa, Lactococcus lactis
FLVNHNYYSF

SEQ ID NO: 885 - protein, 16 aa, Lactococcus lactis
LQKFTGDIENLVKASL

SEQ ID NO: 886 - protein, 9 aa, Lactococcus lactis
VIVPELTFG

SEQ ID NO: 887 - protein, 15 aa, Lactococcus lactis
WIRAGWFIRNRSAHY

SEQ ID NO: 888 - protein, 13 aa, Lactococcus lactis
NKDLFAFMLSIKQ

SEQ ID NO: 889 - protein, 10 aa, Lactococcus lactis
FLVNHNYYSF

SEQ ID NO: 890 - protein, 16 aa, Lactococcus lactis
LQKFTGDIENLVKASL

SEQ ID NO: 891 - protein, 9 aa, Lactococcus lactis
VIVPELTFG

SEQ ID NO: 892 - protein, 15 aa, Lactococcus lactis
WIRAGWFIRNRSAHY

SEQ ID NO: 893 - protein, 13 aa, Lactococcus lactis
NKDLFAFMLSIKQ

SEQ ID NO: 894 - protein, 10 aa, Lactococcus lactis
FLVNHNYYSF

SEQ ID NO: 895 - protein, 16 aa, Lactococcus lactis
LQKFTGDIENLVKASL

SEQ ID NO: 896 - protein, 9 aa, Lactococcus lactis
VIVPELTFG

SEQ ID NO: 897 - protein, 15 aa, Lactococcus lactis
WIRAGWFIRNRSAHY

SEQ ID NO: 898 - protein, 13 aa, Lactococcus lactis
NKDLFAFMLSIKQ

SEQ ID NO: 899 - protein, 10 aa, Lactococcus lactis
FLVNHNYYSF

SEQ ID NO: 900 - protein, 16 aa, Lactococcus lactis
LQKFTGDIENLVKASL

SEQ ID NO: 901 - protein, 9 aa, Lactococcus lactis
VIVPELTFG

SEQ ID NO: 902 - protein, 15 aa, Lactococcus lactis
WIRAGWFIRNRSAHY

SEQ ID NO: 903 - protein, 13 aa, Lactococcus lactis
NKDLFAFMLSIKQ

SEQ ID NO: 904 - protein, 10 aa, Lactococcus lactis
FLVNHNYYSF

SEQ ID NO: 905 - protein, 16 aa, Lactococcus lactis
LQKFTGDIENLVKASL

SEQ ID NO: 906 - protein, 9 aa, Lactococcus lactis
VIVPELTFG

SEQ ID NO: 907 - protein, 15 aa, Lactococcus lactis
WIRAGWFIRNRSAHY

SEQ ID NO: 908 - protein, 13 aa, Lactococcus lactis
NKDLFAFMLSIKQ

SEQ ID NO: 909 - protein, 10 aa, Lactococcus lactis
FLVNHNYYSF

SEQ ID NO: 910 - protein, 16 aa, Lactococcus lactis
LQKFTGDIENLVKASL

SEQ ID NO: 911 - protein, 9 aa, Lactococcus lactis
VIVPELTFG

SEQ ID NO: 912 - protein, 15 aa, Lactococcus lactis
WIRAGWFIRNRSAHY

SEQ ID NO: 913 - protein, 13 aa, Lactococcus lactis
NKDLFAFMLSIKQ

SEQ ID NO: 914 - protein, 10 aa, Lactococcus lactis
FLVNHNYYSF

SEQ ID NO: 915 - protein, 16 aa, Lactococcus lactis
LQKFTGDIENLVKASL

SEQ ID NO: 916 - protein, 9 aa, Lactococcus lactis
VIVPELTFG

SEQ ID NO: 917 - protein, 15 aa, Lactococcus lactis
WIRAGWFIRNRSAHY

SEQ ID NO: 918 - protein, 13 aa, Lactococcus lactis
NKDLFAFMLSIKQ

SEQ ID NO: 919 - protein, 10 aa, Lactococcus lactis
FLVNHNYYSF

SEQ ID NO: 920 - protein, 16 aa, Lactococcus lactis
LQKFTGDIENLVKASL

SEQ ID NO: 921 - protein, 9 aa, Lactococcus lactis
VIVPELTFG

SEQ ID NO: 922 - protein, 15 aa, Lactococcus lactis
WIRAGWFIRNRSAHY

SEQ ID NO: 923 - protein, 13 aa, Lactococcus lactis
NKDLFAFMLSIKQ

SEQ ID NO: 924 - protein, 10 aa, Lactococcus lactis
FLVNHNYYSF

SEQ ID NO: 925 - protein, 16 aa, Lactococcus lactis
LQKFTGDIENLVKASL

SEQ ID NO: 926 - protein, 9 aa, Lactococcus lactis
VIVPELTFG

SEQ ID NO: 927 - protein, 15 aa, Lactococcus lactis
WIRAGWFIRNRSAHY

SEQ ID NO: 928 - protein, 13 aa, Lactococcus lactis
NKDLFAFMLSIKQ

SEQ ID NO: 929 - protein, 10 aa, Lactococcus lactis
FLVNHNYYSF

SEQ ID NO: 930 - protein, 16 aa, Lactococcus lactis
LQKFTGDIENLVKASL

SEQ ID NO: 931 - protein, 9 aa, Lactococcus lactis
VIVPELTFG

SEQ ID NO: 932 - protein, 15 aa, Lactococcus lactis
WIRAGWFIRNRSAHY

SEQ ID NO: 933 - protein, 13 aa, Lactococcus lactis
NKDLFAFMLSIKQ

SEQ ID NO: 934 - protein, 10 aa, Lactococcus lactis
FLVNHNYYSF

SEQ ID NO: 935 - protein, 16 aa, Lactococcus lactis
LQKFTGDIENLVKASL

SEQ ID NO: 936 - protein, 9 aa, Lactococcus lactis
VIVPELTFG

SEQ ID NO: 937 - protein, 15 aa, Lactococcus lactis
WIRAGWFIRNRSAHY

SEQ ID NO: 938 - protein, 13 aa, Lactococcus lactis
NKDLFAFMLSIKQ

SEQ ID NO: 939 - protein, 10 aa, Lactococcus lactis
FLVNHNYYSF

SEQ ID NO: 940 - protein, 16 aa, Lactococcus lactis
LQKFTGDIENLVKASL

SEQ ID NO: 941 - protein, 9 aa, Lactococcus lactis
VIVPELTFG

SEQ ID NO: 942 - protein, 15 aa, Lactococcus lactis
WIRAGWFIRNRSAHY

SEQ ID NO: 943 - protein, 13 aa, Lactococcus lactis
NKDLFAFMLSIKQ

SEQ ID NO: 944 - protein, 10 aa, Lactococcus lactis
FLVNHNYYSF

SEQ ID NO: 945 - protein, 16 aa, Lactococcus lactis
LQKFTGDIENLVKASL

SEQ ID NO: 946 - protein, 9 aa, Lactococcus lactis
VIVPELTFG

SEQ ID NO: 947 - protein, 15 aa, Lactococcus lactis
WIRAGWFIRNRSAHY

SEQ ID NO: 948 - protein, 13 aa, Lactococcus lactis
NKDLFAFMLSIKQ

SEQ ID NO: 949 - protein, 16 aa, Lactococcus lactis
LQKFTGDIENLVKASL

SEQ ID NO: 950 - protein, 15 aa, Lactococcus lactis
WIRAGWFIRNRSAHY

SEQ ID NO: 951 - protein, 13 aa, Lactococcus lactis
NKDLFAFMLSIKQ

SEQ ID NO: 952 - protein, 16 aa, Lactococcus lactis
LQKFTGDIENLVKASL

SEQ ID NO: 953 - protein, 15 aa, Lactococcus lactis
WIRAGWFIRNRSAHY

SEQ ID NO: 954 - protein, 13 aa, Lactococcus lactis
NKDLFAFMLSIKQ

SEQ ID NO: 955 - protein, 16 aa, Lactococcus lactis
LQKFTGDIENLVKASL

SEQ ID NO: 956 - protein, 9 aa, Lactococcus lactis
VIVPELTFG

SEQ ID NO: 957 - protein, 15 aa, Lactococcus lactis
WIRAGWFIRNRSAHY

SEQ ID NO: 958 - protein, 13 aa, Lactococcus lactis
NKDLFAFMLSIKQ

SEQ ID NO: 959 - protein, 16 aa, Lactococcus lactis
LQKFTGDIENLVKASL

SEQ ID NO: 960 - protein, 9 aa, Lactococcus lactis
VIVPELTFG

SEQ ID NO: 961 - protein, 15 aa, Lactococcus lactis
WIRAGWFIRNRSAHY

SEQ ID NO: 962 - protein, 13 aa, Lactococcus lactis
NKDLFAFMLSIKQ

SEQ ID NO: 963 - protein, 10 aa, Lactococcus lactis
FLVNHNYYSF

SEQ ID NO: 964 - protein, 16 aa, Lactococcus lactis
LQKFTGDIENLVKASL

SEQ ID NO: 965 - protein, 9 aa, Lactococcus lactis
VIVPELTFG

SEQ ID NO: 966 - protein, 15 aa, Lactococcus lactis
WIRAGWFIRNRSAHY

SEQ ID NO: 967 - protein, 13 aa, Lactococcus lactis
NKDLFAFMLSIKQ

SEQ ID NO: 968 - protein, 10 aa, Lactococcus lactis
FLVNHNYYSF

SEQ ID NO: 969 - protein, 16 aa, Lactococcus lactis
LQKFTGDIENLVKASL

SEQ ID NO: 970 - protein, 9 aa, Lactococcus lactis
VIVPELTFG

SEQ ID NO: 971 - protein, 15 aa, Lactococcus lactis
WIRAGWFIRNRSAHY

SEQ ID NO: 972 - protein, 13 aa, Lactococcus lactis
NKDLFAFMLSIKQ

SEQ ID NO: 973 - protein, 10 aa, Lactococcus lactis
FLVNHNYYSF

SEQ ID NO: 974 - protein, 16 aa, Lactococcus lactis
LQKFTGDIENLVKASL

SEQ ID NO: 975 - protein, 9 aa, Lactococcus lactis
VIVPELTFG

SEQ ID NO: 976 - protein, 15 aa, Lactococcus lactis
WIRAGWFIRNRSAHY

SEQ ID NO: 977 - protein, 13 aa, Lactococcus lactis
NKDLFAFMLSIKQ

SEQ ID NO: 978 - protein, 10 aa, Lactococcus lactis
FLVNHNYYSF

SEQ ID NO: 979 - protein, 16 aa, Lactococcus lactis
LQKFTGDIENLVKASL

SEQ ID NO: 980 - protein, 9 aa, Lactococcus lactis
VIVPELTFG

SEQ ID NO: 981 - protein, 15 aa, Lactococcus lactis
WIRAGWFIRNRSAHY

SEQ ID NO: 982 - protein, 13 aa, Lactococcus lactis
NKDLFAFMLSIKQ

SEQ ID NO: 983 - protein, 10 aa, Lactococcus lactis
FLVNHNYYSF

SEQ ID NO: 984 - protein, 16 aa, Lactococcus lactis
LQKFTGDIENLVKASL

SEQ ID NO: 985 - protein, 9 aa, Lactococcus lactis
VIVPELTFG

SEQ ID NO: 986 - protein, 15 aa, Lactococcus lactis
WIRAGWFIRNRSAHY

SEQ ID NO: 987 - protein, 13 aa, Lactococcus lactis
NKDLFAFMLSIKQ

SEQ ID NO: 988 - protein, 10 aa, Lactococcus lactis
FLVNHNYYSF

SEQ ID NO: 989 - protein, 16 aa, Lactococcus lactis
LQKFTGDIENLVKASL

SEQ ID NO: 990 - protein, 9 aa, Lactococcus lactis
VIVPELTFG

SEQ ID NO: 991 - protein, 15 aa, Lactococcus lactis
WIRAGWFIRNRSAHY

SEQ ID NO: 992 - protein, 13 aa, Lactococcus lactis
NKDLFAFMLSIKQ

SEQ ID NO: 993 - protein, 15 aa, Lactococcus lactis
IPDWIVDLRHELTHK

SEQ ID NO: 994 - protein, 15 aa, Lactococcus lactis
IPDWIVDLRHELTHK

SEQ ID NO: 995 - protein, 15 aa, Lactococcus lactis
IPDWIVDLRHELTHK

SEQ ID NO: 996 - protein, 15 aa, Lactococcus lactis
IPDWIVDLRHELTHK

SEQ ID NO: 997 - protein, 22 aa, Lactococcus lactis
LKSMLYSMRNSSFHFSTENVDN

SEQ ID NO: 998 - protein, 22 aa, Lactococcus lactis
LKSMLYSMRNSSFHFSTENVDN

SEQ ID NO: 999 - protein, 22 aa, Lactococcus lactis
LKSMLYSMRNSSFHFSTENVDN

SEQ ID NO: 1000 - protein, 22 aa, Lactococcus lactis
LKSMLYSMRNSSFHFSTENVDN

SEQ ID NO: 1001 - protein, 22 aa, Lactococcus lactis
LKSMLYSMRNSSFHFSTENVDN

SEQ ID NO: 1002 - protein, 22 aa, Lactococcus lactis
LKSMLYSMRNSSFHFSTENVDN

SEQ ID NO: 1003 - protein, 22 aa, Lactococcus lactis
LKSMLYSMRNSSFHFSTENVDN

SEQ ID NO: 1004 - protein, 22 aa, Lactococcus lactis
LKSMLYSMRNSSFHFSTENVDN

SEQ ID NO: 1005 - protein, 22 aa, Lactococcus lactis
LKSMLYSMRNSSFHFSTENVDN

SEQ ID NO: 1006 - protein, 22 aa, Lactococcus lactis
LKSMLYSMRNSSFHFSTENVDN

SEQ ID NO: 1007 - protein, 22 aa, Lactococcus lactis
LKSMLYSMRNSSFHFSTENVDN

SEQ ID NO: 1008 - protein, 22 aa, Lactococcus lactis
LKSMLYSMRNSSFHFSTENVDN

SEQ ID NO: 1009 - protein, 22 aa, Lactococcus lactis
LKSMLYSMRNSSFHFSTENVDN

SEQ ID NO: 1010 - protein, 22 aa, Lactococcus lactis
LKSMLYSMRNSSFHFSTENVDN

SEQ ID NO: 1011 - protein, 22 aa, Lactococcus lactis
LKSMLYSMRNSSFHFSTENVDN

SEQ ID NO: 1012 - protein, 22 aa, Lactococcus lactis
LKSMLYSMRNSSFHFSTENVDN

SEQ ID NO: 1013 - protein, 22 aa, Lactococcus lactis
LKSMLYSMRNSSFHFSTENVDN

SEQ ID NO: 1014 - protein, 22 aa, Lactococcus lactis
LKSMLYSMRNSSFHFSTENVDN

SEQ ID NO: 1015 - protein, 13 aa, Lactococcus lactis
FRNEIDHFYFYDR

SEQ ID NO: 1016 - protein, 13 aa, Lactococcus lactis
FRNEIDHFYFYDR

SEQ ID NO: 1017 - protein, 13 aa, Lactococcus lactis
FRNEIDHFYFYDR

SEQ ID NO: 1018 - protein, 13 aa, Lactococcus lactis
FRNEIDHFYFYDR

SEQ ID NO: 1019 - protein, 13 aa, Lactococcus lactis
FRNEIDHFYFYDR

SEQ ID NO: 1020 - protein, 13 aa, Lactococcus lactis
FRNEIDHFYFYDR

SEQ ID NO: 1021 - protein, 13 aa, Lactococcus lactis
FRNEIDHFYFYDR

SEQ ID NO: 1022 - protein, 13 aa, Lactococcus lactis
FRNEIDHFYFYDR

SEQ ID NO: 1023 - protein, 13 aa, Lactococcus lactis
FRNEIDHFYFYDR

SEQ ID NO: 1024 - protein, 13 aa, Lactococcus lactis
FRNEIDHFYFYDR

SEQ ID NO: 1025 - protein, 13 aa, Lactococcus lactis
FRNEIDHFYFYDR

SEQ ID NO: 1026 - protein, 13 aa, Lactococcus lactis
FRNEIDHFYFYDR

SEQ ID NO: 1027 - protein, 13 aa, Lactococcus lactis
FRNEIDHFYFYDR

SEQ ID NO: 1028 - protein, 13 aa, Lactococcus lactis
FRNEIDHFYFYDR

SEQ ID NO: 1029 - protein, 13 aa, Lactococcus lactis
FRNEIDHFYFYDR

SEQ ID NO: 1030 - protein, 13 aa, Lactococcus lactis
FRNEIDHFYFYDR

SEQ ID NO: 1031 - protein, 13 aa, Lactococcus lactis
FRNEIDHFYFYDR

SEQ ID NO: 1032 - protein, 13 aa, Lactococcus lactis
FRNEIDHFYFYDR

SEQ ID NO: 1033 - protein, 1200 aa, Artificial Sequence
  Description of Artificial Sequence: Synthetic polypeptide
  MOD_RES (7)..(7): Any amino acid
  MOD_RES (11)..(13): Any amino acid
  MOD_RES (18)..(18): Any amino acid
  MOD_RES (20)..(21): Any amino acid
  MOD_RES (39)..(39): Any amino acid
  MOD_RES (75)..(75): Any amino acid
  MOD_RES (93)..(93): Any amino acid
  MOD_RES (100)..(100): Any amino acid
  MOD_RES (145)..(145): Any amino acid
  MOD_RES (149)..(149): Any amino acid
  MOD_RES (154)..(154): Any amino acid
  MOD_RES (216)..(216): Any amino acid
  MOD_RES (236)..(236): Any amino acid
  MOD_RES (278)..(278): Any amino acid
  MOD_RES (315)..(315): Any amino acid
  MOD_RES (317)..(317): Any amino acid
  MOD_RES (319)..(319): Any amino acid
  MOD_RES (370)..(370): Any amino acid
  MOD_RES (407)..(407): Any amino acid
  MOD_RES (419)..(419): Any amino acid
  MOD_RES (428)..(428): Any amino acid
  MOD_RES (445)..(445): Any amino acid
  MOD_RES (455)..(455): Any amino acid
  MOD_RES (563)..(563): Any amino acid
  MOD_RES (717)..(717): Any amino acid
  MOD_RES (795)..(796): Any amino acid
  MOD_RES (800)..(800): Any amino acid
  MOD_RES (942)..(942): Any amino acid
  MOD_RES (971)..(971): Any amino acid
  MOD_RES (1045)..(1045): Any amino acid
  MOD_RES (1050)..(1050): Any amino acid
  MOD_RES (1063)..(1064): Any amino acid
  MOD_RES (1117)..(1118): Any amino acid
  MOD_RES (1132)..(1132): Any amino acid
  MOD_RES (1138)..(1138): Any amino acid
  MOD_RES (1194)..(1194): Any amino acid
  MOD_RES (1196)..(1196): Any amino acid
MLFFMSXDITXXXNMMMXYXXFTNLYPLSKTLRFELKPXGKTLENIEKNGLLEKDEKRAEDYKKVKKIIDEYHKXFIEEALSSVKLSELEEYXDLYLKKXKDDKDKKALKKEQDKLRKEIVKAFKADEKYKKLFKKELILKDLPXFVKXEEDKXLLKSFKGFTTYFTGFHENRKNMYSDEDKSTAIAYRIIHENLPKFIDNIKIFEKIKEKAELLXZIELEEIFSLDYYNNVLTQXGIDKYNAIIGGISTEDGKIKGLNEYINLYNQQNKDKKKLPKXKPLYKQILSDRESLSFLPEKFEDDEEVLDAIKEFYDXIXEXILEKLKLLFDNLSEYDLSKIYIKNDALTTISQKVFGDWSVIGDALEEYYDXPKKKKEKYEEKRKKKLKKKKSFSLEELNELLEERIEXYFATLGDLIENXYLAAEKLLXTEYPEEKNLKKDKEAVXAIKDLLDSIXBLQHFLKPLLGKGDELDKDENFYGEFEELYEELDEIIPLYNKVRNYLTQKPYSTEKIKLNFENPTLLNGWDKNKEKDNLAIILRKDGKYYLGIMNKKHNKIFDNKPKXCYEKMVYKLLPGPNKMLPKVFFSKKNIKEYNPSEEILEIYKKGTHKKGDNFSLKDCHKLIDFFKESIEKHEDWKKFGFKFSDTESYNDISEFYREVEKQGYKLSFTKISESYIDSLVEEGKLYLFQIYNKDFSPYSKGKPNLHTLYWKALFSEXNLKDVVYKLNGEAEIFYRKASIKKKKITHKAGEPIKNKNNPKKESKFEYDIIKDKRYTEDKFFFHVPITMNFKASGNXXFNDXVNEYIRENDDVHIIGIDRGERNLLYYSVIDSKGNILEQDSLNIINNKTDYHDLLDEREKERDKARKNWQTIENIKELKEGYLSQVVHKIAKLMIKYNAIVVLEDLNFGFKRGRQKVEKQVYQKFEKMLIDKLNYLVDKDKEXDEIGGLLNAYQLTNPFESFKKLGKQTGFXFYVPAWNTSKIDPTTGFVNLFYPKYENVDKAKEFFSKFDSIRYNDKDYFEFAFDYKNFTKKAEGSRTKWTICTXGERIXNFRNSDKNNKWDXXEIDLTEELKELFKDYGINYGEDLKEAICSEDDKDFFKSLLYLLKLTLQMRNSXXDDYIISPVANDNGXFFDSRXAKLPKDADANGAYNIARKGLWLLEQIKNTDEGKKALISNKEWLEFAQNRPYLKDAXAXNKKH

SEQ ID NO: 1034 - RNA, 37 nt, Artificial Sequence
  Description of Artificial Sequence: Synthetic oligonucleotide
gugcccacuucucagaucgcucgcucagugauccgac

SEQ ID NO: 1035 - RNA, 105 nt, Artificial Sequence
  Description of Artificial Sequence: Synthetic polynucleotide
gucagaacacugagcgagcguuguuuuugagaagcucaacgggcuuugccaccuggaaaguggccauuggcacacccguugaaaaaauucuguccucuagacaga

SEQ ID NO: 1036 - RNA, 105 nt, Artificial Sequence; identical to SEQ ID NO: 1035
  Description of Artificial Sequence: Synthetic polynucleotide

SEQ ID NO: 1037 - RNA, 37 nt, Artificial Sequence; identical to SEQ ID NO: 1034
  Description of Artificial Sequence: Synthetic oligonucleotide

SEQ ID NO: 1038 - RNA, 37 nt, Artificial Sequence; identical to SEQ ID NO: 1034
  Description of Artificial Sequence: Synthetic oligonucleotide

SEQ ID NO: 1039 - RNA, 64 nt, Artificial Sequence
  Description of Artificial Sequence: Synthetic oligonucleotide
cuuggggaaagcuaggcaaguuuuggaugauaagaaauaaucaugucacaaggagggaguuuuu

SEQ ID NO: 1040 - RNA, 64 nt, Artificial Sequence; identical to SEQ ID NO: 1039
  Description of Artificial Sequence: Synthetic oligonucleotide

SEQ ID NO: 1041 - RNA, 37 nt, Artificial Sequence; identical to SEQ ID NO: 1034
  Description of Artificial Sequence: Synthetic oligonucleotide

SEQ ID NO: 1042 - RNA, 36 nt, Artificial Sequence; identical to SEQ ID NO: 27
  Description of Artificial Sequence: Synthetic oligonucleotide

SEQ ID NO: 1043 - RNA, 75 nt, Artificial Sequence; identical to SEQ ID NO: 28
  Description of Artificial Sequence: Synthetic oligonucleotide

SEQ ID NO: 1044 - RNA, 75 nt, Artificial Sequence; identical to SEQ ID NO: 28
  Description of Artificial Sequence: Synthetic oligonucleotide

SEQ ID NO: 1045 - RNA, 36 nt, Artificial Sequence; identical to SEQ ID NO: 27
  Description of Artificial Sequence: Synthetic oligonucleotide

SEQ ID NO: 1046 - RNA, 36 nt, Artificial Sequence; identical to SEQ ID NO: 30
  Description of Artificial Sequence: Synthetic oligonucleotide

SEQ ID NO: 1047 - RNA, 107 nt, Artificial Sequence; identical to SEQ ID NO: 31
  Description of Artificial Sequence: Synthetic polynucleotide

SEQ ID NO: 1048 - RNA, 107 nt, Artificial Sequence; identical to SEQ ID NO: 31
  Description of Artificial Sequence: Synthetic polynucleotide

SEQ ID NO: 1049 - RNA, 36 nt, Artificial Sequence; identical to SEQ ID NO: 30
  Description of Artificial Sequence: Synthetic oligonucleotide

SEQ ID NO: 1050 - RNA, 36 nt, Artificial Sequence; identical to SEQ ID NO: 33
  Description of Artificial Sequence: Synthetic oligonucleotide

SEQ ID NO: 1051 - RNA, 69 nt, Artificial Sequence; identical to SEQ ID NO: 34
  Description of Artificial Sequence: Synthetic oligonucleotide

SEQ ID NO: 1052 - RNA, 69 nt, Artificial Sequence; identical to SEQ ID NO: 34
  Description of Artificial Sequence: Synthetic oligonucleotide

SEQ ID NO: 1053 - RNA, 36 nt, Artificial Sequence; identical to SEQ ID NO: 33
  Description of Artificial Sequence: Synthetic oligonucleotide

SEQ ID NO: 1054 - RNA, 35 nt, Artificial Sequence
  Description of Artificial Sequence: Synthetic oligonucleotide
guauugagaaaagccagauauaguuggcaauagac

SEQ ID NO: 1055 - RNA, 62 nt, Artificial Sequence
  Description of Artificial Sequence: Synthetic oligonucleotide
auauuuugauucccauuuaugguuauuuaccauaaaugggaaucaacuaaaaaauauuuuuu

SEQ ID NO: 1056 - RNA, 62 nt, Artificial Sequence; identical to SEQ ID NO: 1055
  Description of Artificial Sequence: Synthetic oligonucleotide

SEQ ID NO: 1057 - RNA, 35 nt, Artificial Sequence; identical to SEQ ID NO: 1054
  Description of Artificial Sequence: Synthetic oligonucleotide

SEQ ID NO: 1058 - RNA, 36 nt, Artificial Sequence; identical to SEQ ID NO: 33
  Description of Artificial Sequence: Synthetic oligonucleotide

SEQ ID NO: 1059 - RNA, 35 nt, Artificial Sequence
  Description of Artificial Sequence: Synthetic oligonucleotide
gcuggagaagauagcccaagaaagagggcaauaac

SEQ ID NO: 1060 - RNA, 78 nt, Artificial Sequence
  Description of Artificial Sequence: Synthetic oligonucleotide
auuauuaccauuuugguuggaaugcuauuauaaaggaucauucgauuauuaccucuaccucccuucccacgauuucuu

SEQ ID NO: 1061 - RNA, 78 nt, Artificial Sequence; identical to SEQ ID NO: 1060
  Description of Artificial Sequence: Synthetic oligonucleotide

SEQ ID NO: 1062 - RNA, 36 nt, Artificial Sequence; identical to SEQ ID NO: 33
  Description of Artificial Sequence: Synthetic oligonucleotide

SEQ ID NO: 1063 - RNA, 78 nt, Artificial Sequence; identical to SEQ ID NO: 1060
  Description of Artificial Sequence: Synthetic oligonucleotide

SEQ ID NO: 1064 - RNA, 35 nt, Artificial Sequence; identical to SEQ ID NO: 1059
  Description of Artificial Sequence: Synthetic oligonucleotide

SEQ ID NO: 1065 - RNA, 36 nt, Artificial Sequence; identical to SEQ ID NO: 33
  Description of Artificial Sequence: Synthetic oligonucleotide

SEQ ID NO: 1066 - RNA, 105 nt, Artificial Sequence; identical to SEQ ID NO: 1035
  Description of Artificial Sequence: Synthetic polynucleotide

SEQ ID NO: 1067 - RNA, 105 nt, Artificial Sequence; identical to SEQ ID NO: 1035
  Description of Artificial Sequence: Synthetic polynucleotide

SEQ ID NO: 1068 - RNA, 36 nt, Artificial Sequence; identical to SEQ ID NO: 33
  Description of Artificial Sequence: Synthetic oligonucleotide

SEQ ID NO: 1069 - RNA, 35 nt, Artificial Sequence; identical to SEQ ID NO: 36
  Description of Artificial Sequence: Synthetic oligonucleotide

SEQ ID NO: 1070 - RNA, 35 nt, Artificial Sequence
  Description of Artificial Sequence: Synthetic oligonucleotide
guuaugaaaacagcccgacauagaggcaauagaca

SEQ ID NO: 1071 - RNA, 36 nt, Artificial Sequence
  Description of Artificial Sequence: Synthetic oligonucleotide
guuauaguccucuuacauuuagagguagucuuuaau

SEQ ID NO: 1072 - RNA, 98 nt, Artificial Sequence
  Description of Artificial Sequence: Synthetic oligonucleotide
uguuaagaacuucucuaccugaaguuggauuauaaaugacucuugcucucauagauauccuccuuugaaaauauacacugccgauuaauuaccguuuu

SEQ ID NO: 1073 - RNA, 98 nt, Artificial Sequence; identical to SEQ ID NO: 1072
  Description of Artificial Sequence: Synthetic oligonucleotide

SEQ ID NO: 1074 - RNA, 36 nt, Artificial Sequence; identical to SEQ ID NO: 1071
  Description of Artificial Sequence: Synthetic oligonucleotide

SEQ ID NO: 1075 - RNA, 36 nt, Artificial Sequence
  Description of Artificial Sequence: Synthetic oligonucleotide
guuauaguccucuuacauuuagagguaguuuauauu

SEQ ID NO: 1076 - RNA, 36 nt, Artificial Sequence; identical to SEQ ID NO: 1075
  Description of Artificial Sequence: Synthetic oligonucleotide

SEQ ID NO: 1077 - RNA, 101 nt, Artificial Sequence
  Description of Artificial Sequence: Synthetic polynucleotide
aauauaaauucucccuaaauauaagagaauaauaacucaaucucuucauucguauuugucuaguuaagauaaguaccaccaaauacaaucaauccaaaaaa

SEQ ID NO: 1078 - RNA, 36 nt, Artificial Sequence; identical to SEQ ID NO: 1075
  Description of Artificial Sequence: Synthetic oligonucleotide

SEQ ID NO: 1079 - RNA, 101 nt, Artificial Sequence; identical to SEQ ID NO: 1077
  Description of Artificial Sequence: Synthetic polynucleotide

SEQ ID NO: 1080 - RNA, 36 nt, Artificial Sequence; identical to SEQ ID NO: 1075
  Description of Artificial Sequence: Synthetic oligonucleotide

SEQ ID NO: 1081 - RNA, 101 nt, Artificial Sequence; identical to SEQ ID NO: 1077
  Description of Artificial Sequence: Synthetic polynucleotide

SEQ ID NO: 1082 - RNA, 36 nt, Artificial Sequence; identical to SEQ ID NO: 1075
  Description of Artificial Sequence: Synthetic oligonucleotide

SEQ ID NO: 1083 - RNA, 36 nt, Artificial Sequence; identical to SEQ ID NO: 1075
  Description of Artificial Sequence: Synthetic oligonucleotide

SEQ ID NO: 1084 - RNA, 101 nt, Artificial Sequence; identical to SEQ ID NO: 1077
  Description of Artificial Sequence: Synthetic polynucleotide

SEQ ID NO: 1085 - RNA, 101 nt, Artificial Sequence; identical to SEQ ID NO: 1077
  Description of Artificial Sequence: Synthetic polynucleotide

SEQ ID NO: 1086 - RNA, 36 nt, Artificial Sequence; identical to SEQ ID NO: 1075
  Description of Artificial Sequence: Synthetic oligonucleotide

SEQ ID NO: 1087 - RNA, 36 nt, Artificial Sequence; identical to SEQ ID NO: 1075
  Description of Artificial Sequence: Synthetic oligonucleotide

SEQ ID NO: 1088 - RNA, 36 nt, Artificial Sequence; identical to SEQ ID NO: 1075
  Description of Artificial Sequence: Synthetic oligonucleotide

SEQ ID NO: 1089 - RNA, 101 nt, Artificial Sequence; identical to SEQ ID NO: 1077
  Description of Artificial Sequence: Synthetic polynucleotide

SEQ ID NO: 1090 - RNA, 36 nt, Artificial Sequence; identical to SEQ ID NO: 1075
  Description of Artificial Sequence: Synthetic oligonucleotide

SEQ ID NO: 1091 - RNA, 101 nt, Artificial Sequence; identical to SEQ ID NO: 1077
  Description of Artificial Sequence: Synthetic polynucleotide

SEQ ID NO: 1092 - RNA, 36 nt, Artificial Sequence; identical to SEQ ID NO: 1075
  Description of Artificial Sequence: Synthetic oligonucleotide

SEQ ID NO: 1093 - RNA, 36 nt, Artificial Sequence; identical to SEQ ID NO: 1075
  Description of Artificial Sequence: Synthetic oligonucleotide

SEQ ID NO: 1094 - RNA, 105 nt, Artificial Sequence; identical to SEQ ID NO: 1035
  Description of Artificial Sequence: Synthetic polynucleotide

SEQ ID NO: 1095 - RNA, 101 nt, Artificial Sequence; identical to SEQ ID NO: 1077
  Description of Artificial Sequence: Synthetic polynucleotide

SEQ ID NO: 1096 - RNA, 36 nt, Artificial Sequence; identical to SEQ ID NO: 1075
  Description of Artificial Sequence: Synthetic oligonucleotide

SEQ ID NO: 1097 - RNA, 105 nt, Artificial Sequence; identical to SEQ ID NO: 1035
  Description of Artificial Sequence: Synthetic polynucleotide

SEQ ID NO: 1098 - RNA, 36 nt, Artificial Sequence; identical to SEQ ID NO: 1075
  Description of Artificial Sequence: Synthetic oligonucleotide

SEQ ID NO: 1099 - RNA, 101 nt, Artificial Sequence; identical to SEQ ID NO: 1077
  Description of Artificial Sequence: Synthetic polynucleotide

SEQ ID NO: 1100 - RNA, 36 nt, Artificial Sequence; identical to SEQ ID NO: 1075
  Description of Artificial Sequence: Synthetic oligonucleotide

SEQ ID NO: 1101 - RNA, 101 nt, Artificial Sequence; identical to SEQ ID NO: 1077
  Description of Artificial Sequence: Synthetic polynucleotide

SEQ ID NO: 1102 - RNA, 36 nt, Artificial Sequence; identical to SEQ ID NO: 1075
  Description of Artificial Sequence: Synthetic oligonucleotide

SEQ ID NO: 1103 - RNA, 101 nt, Artificial Sequence; identical to SEQ ID NO: 1077
  Description of Artificial Sequence: Synthetic polynucleotide

SEQ ID NO: 1104 - RNA, 36 nt, Artificial Sequence; identical to SEQ ID NO: 1075
  Description of Artificial Sequence: Synthetic oligonucleotide

SEQ ID NO: 1105 - RNA, 36 nt, Artificial Sequence; identical to SEQ ID NO: 1075
  Description of Artificial Sequence: Synthetic oligonucleotide

SEQ ID NO: 1106 - RNA, 36 nt, Artificial Sequence; identical to SEQ ID NO: 1075
  Description of Artificial Sequence: Synthetic oligonucleotide

SEQ ID NO: 1107 - RNA, 36 nt, Artificial Sequence; identical to SEQ ID NO: 1075
  Description of Artificial Sequence: Synthetic oligonucleotide

SEQ ID NO: 1108 - RNA, 36 nt, Artificial Sequence; identical to SEQ ID NO: 1075
  Description of Artificial Sequence: Synthetic oligonucleotide

SEQ ID NO: 1109 - RNA, 36 nt, Artificial Sequence; identical to SEQ ID NO: 1075
  Description of Artificial Sequence: Synthetic oligonucleotide

SEQ ID NO: 1110 - protein, 1300 aa, Artificial Sequence; identical to SEQ ID NO: 48
  Description of Artificial Sequence: Synthetic polypeptide

SEQ ID NO: 1111 - protein, 1300 aa, Artificial Sequence; identical to SEQ ID NO: 48
  Description of Artificial Sequence: Synthetic polypeptide

SEQ ID NO: 1112 - protein, 1300 aa, Artificial Sequence; identical to SEQ ID NO: 48
  Description of Artificial Sequence: Synthetic polypeptide

SEQ ID NO: 1113 - protein, 1300 aa, Artificial Sequence; identical to SEQ ID NO: 48
  Description of Artificial Sequence: Synthetic polypeptide

SEQ ID NO: 1114 - protein, 1300 aa, Artificial Sequence; identical to SEQ ID NO: 48
  Description of Artificial Sequence: Synthetic polypeptide

SEQ ID NO: 1115 - protein, 1300 aa, Artificial Sequence; identical to SEQ ID NO: 48
  Description of Artificial Sequence: Synthetic polypeptide

SEQ ID NO: 1116 - protein, 1300 aa, Artificial Sequence; identical to SEQ ID NO: 48
  Description of Artificial Sequence: Synthetic polypeptide

SEQ ID NO: 1117 - protein, 1300 aa, Artificial Sequence; identical to SEQ ID NO: 48
  Description of Artificial Sequence: Synthetic polypeptide

SEQ ID NO: 1118 - protein, 1300 aa, Artificial Sequence; identical to SEQ ID NO: 48
  Description of Artificial Sequence: Synthetic polypeptide

SEQ ID NO: 1119 - protein, 1300 aa, Artificial Sequence; identical to SEQ ID NO: 48
  Description of Artificial Sequence: Synthetic polypeptide

SEQ ID NO: 1120 - protein, 1300 aa, Artificial Sequence; identical to SEQ ID NO: 48
  Description of Artificial Sequence: Synthetic polypeptide

SEQ ID NO: 1121 - protein, 1300 aa, Artificial Sequence; identical to SEQ ID NO: 48
  Description of Artificial Sequence: Synthetic polypeptide

SEQ ID NO: 1122 - protein, 1300 aa, Artificial Sequence; identical to SEQ ID NO: 48
  Description of Artificial Sequence: Synthetic polypeptide

SEQ ID NO: 1123 - protein, 1300 aa, Artificial Sequence; identical to SEQ ID NO: 48
  Description of Artificial Sequence: Synthetic polypeptide

SEQ ID NO: 1124 - protein, 1300 aa, Artificial Sequence; identical to SEQ ID NO: 48
  Description of Artificial Sequence: Synthetic polypeptide

SEQ ID NO: 1125 - protein, 1300 aa, Artificial Sequence; identical to SEQ ID NO: 48
  Description of Artificial Sequence: Synthetic polypeptide

SEQ ID NO: 1126 - protein, 1300 aa, Artificial Sequence; identical to SEQ ID NO: 48
  Description of Artificial Sequence: Synthetic polypeptide

SEQ ID NO: 1127 - protein, 1300 aa, Artificial Sequence; identical to SEQ ID NO: 48
  Description of Artificial Sequence: Synthetic polypeptide

SEQ ID NO: 1128 - protein, 1300 aa, Artificial Sequence; identical to SEQ ID NO: 48
  Description of Artificial Sequence: Synthetic polypeptide

SEQ ID NO: 1129 - protein, 1300 aa, Artificial Sequence; identical to SEQ ID NO: 48
  Description of Artificial Sequence: Synthetic polypeptide

SEQ ID NO: 1130 - protein, 1300 aa, Artificial Sequence; identical to SEQ ID NO: 48
  Description of Artificial Sequence: Synthetic polypeptide

SEQ ID NO: 1131 - protein, 1300 aa, Artificial Sequence; identical to SEQ ID NO: 48
  Description of Artificial Sequence: Synthetic polypeptide

SEQ ID NO: 1132 - protein, 1300 aa, Artificial Sequence; identical to SEQ ID NO: 48
  Description of Artificial Sequence: Synthetic polypeptide

SEQ ID NO: 1133 - protein, 1300 aa, Artificial Sequence; identical to SEQ ID NO: 48
  Description of Artificial Sequence: Synthetic polypeptide

SEQ ID NO: 1134 - protein, 1300 aa, Artificial Sequence; identical to SEQ ID NO: 48
  Description of Artificial Sequence: Synthetic polypeptide

SEQ ID NO: 1135 - protein, 1300 aa, Artificial Sequence; identical to SEQ ID NO: 48
  Description of Artificial Sequence: Synthetic polypeptide

SEQ ID NO: 1136 - protein, 1300 aa, Artificial Sequence; identical to SEQ ID NO: 48
  Description of Artificial Sequence: Synthetic polypeptide

SEQ ID NO: 1137 - protein, 1300 aa, Artificial Sequence; identical to SEQ ID NO: 48
  Description of Artificial Sequence: Synthetic polypeptide

SEQ ID NO: 1138 - protein, 1300 aa, Artificial Sequence; identical to SEQ ID NO: 48
  Description of Artificial Sequence: Synthetic polypeptide

SEQ ID NO: 1139 - protein, 1300 aa, Artificial Sequence; identical to SEQ ID NO: 48
  Description of Artificial Sequence: Synthetic polypeptide

SEQ ID NO: 1140 - protein, 1300 aa, Artificial Sequence; identical to SEQ ID NO: 48
  Description of Artificial Sequence: Synthetic polypeptide

SEQ ID NO: 1141 - protein, 1300 aa, Artificial Sequence; identical to SEQ ID NO: 48
  Description of Artificial Sequence: Synthetic polypeptide

SEQ ID NO: 1142 - protein, 1300 aa, Artificial Sequence; identical to SEQ ID NO: 48
  Description of Artificial Sequence: Synthetic polypeptide

SEQ ID NO: 1143 - protein, 1300 aa, Artificial Sequence; identical to SEQ ID NO: 48
  Description of Artificial Sequence: Synthetic polypeptide

SEQ ID NO: 1144 - protein, 1300 aa, Artificial Sequence; identical to SEQ ID NO: 48
  Description of Artificial Sequence: Synthetic polypeptide

SEQ ID NO: 1145 - protein, 1300 aa, Artificial Sequence; identical to SEQ ID NO: 48
  Description of Artificial Sequence: Synthetic polypeptide

SEQ ID NO: 1146 - protein, 1300 aa, Artificial Sequence; identical to SEQ ID NO: 48
  Description of Artificial Sequence: Synthetic polypeptide

SEQ ID NO: 1147 - protein, 1300 aa, Artificial Sequence; identical to SEQ ID NO: 48
  Description of Artificial Sequence: Synthetic polypeptide

SEQ ID NO: 1148 - protein, 1300 aa, Artificial Sequence; identical to SEQ ID NO: 48
  Description of Artificial Sequence: Synthetic polypeptide

SEQ ID NO: 1149 - protein, 1300 aa, Artificial Sequence; identical to SEQ ID NO: 48
  Description of Artificial Sequence: Synthetic polypeptide

SEQ ID NO: 1150 - protein, 1300 aa, Artificial Sequence; identical to SEQ ID NO: 48
  Description of Artificial Sequence: Synthetic polypeptide

SEQ ID NO: 1151 - protein, 1300 aa, Artificial Sequence; identical to SEQ ID NO: 48
  Description of Artificial Sequence: Synthetic polypeptide

SEQ ID NO: 1152 - protein, 1300 aa, Artificial Sequence; identical to SEQ ID NO: 48
  Description of Artificial Sequence: Synthetic polypeptide

SEQ ID NO: 1153 - protein, 1300 aa, Artificial Sequence; identical to SEQ ID NO: 48
  Description of Artificial Sequence: Synthetic polypeptide

SEQ ID NO: 1154 - protein, 1300 aa, Artificial Sequence; identical to SEQ ID NO: 48
  Description of Artificial Sequence: Synthetic polypeptide

SEQ ID NO: 1155 - protein, 1300 aa, Artificial Sequence; identical to SEQ ID NO: 48
  Description of Artificial Sequence: Synthetic polypeptide

SEQ ID NO: 1156 - protein, 1300 aa, Artificial Sequence; identical to SEQ ID NO: 48
  Description of Artificial Sequence: Synthetic polypeptide

SEQ ID NO: 1157 - protein, 1300 aa, Artificial Sequence; identical to SEQ ID NO: 48
  Description of Artificial Sequence: Synthetic polypeptide

SEQ ID NO: 1158 - protein, 1300 aa, Artificial Sequence; identical to SEQ ID NO: 48
  Description of Artificial Sequence: Synthetic polypeptide

SEQ ID NO: 1159 - protein, 1300 aa, Artificial Sequence; identical to SEQ ID NO: 48
  Description of Artificial Sequence: Synthetic polypeptide

SEQ ID NO: 1160 - protein, 1300 aa, Artificial Sequence; identical to SEQ ID NO: 48
  Description of Artificial Sequence: Synthetic polypeptide

SEQ ID NO: 1161 - protein, 1300 aa, Artificial Sequence; identical to SEQ ID NO: 48
  Description of Artificial Sequence: Synthetic polypeptide

SEQ ID NO: 1162 - protein, 1300 aa, Artificial Sequence; identical to SEQ ID NO: 48
  Description of Artificial Sequence: Synthetic polypeptide

SEQ ID NO: 1163 - protein, 1300 aa, Artificial Sequence; identical to SEQ ID NO: 48
  Description of Artificial Sequence: Synthetic polypeptide

SEQ ID NO: 1164 - protein, 1300 aa, Artificial Sequence; identical to SEQ ID NO: 48
  Description of Artificial Sequence: Synthetic polypeptide

SEQ ID NO: 1165 - protein, 1300 aa, Artificial Sequence; identical to SEQ ID NO: 48
  Description of Artificial Sequence: Synthetic polypeptide

SEQ ID NO: 1166 - protein, 1300 aa, Artificial Sequence; identical to SEQ ID NO: 48
  Description of Artificial Sequence: Synthetic polypeptide

SEQ ID NO: 1167 - DNA, 10737 bp, Artificial Sequence
  Description of Artificial Sequence: Synthetic polynucleotide
gaattccggatgagcattcatcaggcgggcaagaatgtgaataaaggccggataaaacttgtgcttatttttctttacggtctttaaaaaggccgtaatatccagctgaacggtctggttataggtacattgagcaactgactgaaatgcctcaaaatgttctttacgatgccattgggatatatcaacggtggtatatccagtgatttttttctccattttagcttccttagctcctgaaaatctcgataactcaaaaaatacgcccggtagtgatcttatttcattatggtgaaagttggaacctcttacgtgccgatcaacgtctcattttcgccaaaagttggcccagggcttcccggtatcaacagggacaccaggatttatttattctgcgaagtgatcttccgtcacaggtatttattcggcgcaaagtgcgtcgggtgatgctgccaacttactgatttagtgtatgatggtgtttttgaggtgctccagtggcttctgtttctatcagctgtccctcctgttcagctactgacggggtggtgcgtaacggcaaaagcaccgccggacatcagcgctagcggagtgtatactggcttactatgttggcactgatgagggtgtcagtgaagtgcttcatgtggcaggagaaaaaaggctgcaccggtgcgtcagcagaatatgtgatacaggatatattccgcttcctcgctcactgactcgctacgctcggtcgttcgactgcggcgagcggaaatggcttacgaacggggcggagatttcctggaagatgccaggaagatacttaacagggaagtgagagggccgcggcaaagccgtttttccataggctccgcccccctgacaagcatcacgaaatctgacgctcaaatcagtggtggcgaaacccgacaggactataaagataccaggcgtttccccctggcggctccctcgtgcgctctcctgttcctgcctttcggtttaccggtgtcattccgctgttatggccgcgtttgtctcattccacgcctgacactcagttccgggtaggcagttcgctccaagctggactgtatgcacgaaccccccgttcagtccgaccgctgcgccttatccggtaactatcgtcttgagtccaacccggaaagacatgcaaaagcaccactggcagcagccactggtaattgatttagaggagttagtcttgaagtcatgcgccggttaaggctaaactgaaaggacaagttttggtgactgcgctcctccaagccagttacctcggttcaaagagttggtagctcagagaaccttcgaaaaaccgccctgcaaggcggttttttcgttttcagagcaagagattacgcgcagaccaaaacgatctcaagaagatcatcttattaatcagataaaatatttttagagtgttctgacggctaaaggccgtgcttatcatccatcgaaaacggcaacgcacatttatcagatgttcgcaatgatggacccataaaagggggccgtgagtgtctaagccggcagtacagcctattaggcacaataatgcacattgttgggtgaaaactccaagttcgtggtggaaaggaggtttctggagtgaaaaagccgaatctgaaaaatcagcaaaagcgcatcaccatcgcgctcaggcttacggttgcatcgtcgcgacacaagtaacaaacccgtgtggatggagtgcgctaggtgcgctccatccccccatccttgaacagaggtgcgaacatggccgtcaaatccatcaaagtgaaacttcgtctcgacgatatgccggagattcgggccggtctatggaaacttcataaggaagtcaatgcgggggttcgatattacacggaatggctcagtcttctccgtcaagagaacttgtatcgaagaagtccgaatggggacggagagcaagaatgtgataagactgcagaagaatgcaaagccgaattgttggagcggctgcgcgcgcgtcaagtggagaatggacaccgtggtccggcgggatcggacgatgaattgctgcagttggcgcgtcaactctatgagttgttggttccgcaggcgataggtgcgaaaggcgacgcgcagcaaattgcccgcaaatttttgagccccttggccgacaaggacgcagttggtgggcttggaatcgcgaaggcggggaacaaaccgcggtgggttcgcatgcgcgaagcgggggaaccaggctgggaagaggagaaggagaaggctgagacgaggaaatctgcggatcggactgcggatgttttgcgcgcgctcgcggattttgggttaaagccactgatgcgcgtatacaccgattctgagatgtcatcggtggagtggaaaccgcttcggaagggacaagccgttcggacgtgggatagggacatgttccaacaagctatcgaacggatgatgtcgtgggagtcgtggaatcagcgcgttgggcaagagtacgcgaaactcgtagaacaaaaaaatcgatttgagcagaagaatttcgtcggccaggaacatctggtccatctcgtcaatcagttgcaacaagatatgaaagaagcatcgcccggactcgaatcgaaagagcaaaccgcgcactatgtgacgggacgggcattgcgcggatcggacaaggtatttgagaagtgggggaaactcgcccccgatgcacctttcgatttgtacgacgccgaaatcaagaatgtgcagagacgtaacacgagacgattcggatcacatgacttgttcgcaaaattggcagagccagagtatcaggccctgtggcgcgaagatgcttcgtttctcacgcgttacgcggtgtacaacagcatccttcgcaaactgaatcacgccaaaatgttcgcgacgtttactttgccggatgcaacggcgcacccgatttggactcgcttcgataaattgggtgggaatttgcaccagtacacctttttgttcaacgaatttggagaacgcaggcacgcgattcgttttcacaagctattgaaagtcgagaatggtgtcgcaagagaagttgatgatgtcaccgtgcccatttcaatgtcagagcaattggataatctgcttcccagagatcccaatgaaccgattgcgctatattttcgagattacggagccgaacagcatttcacaggtgaatttggtggcgcgaagatccagtgccgccgggatcagctggctcatatgcaccgacgcagaggggcgagggatgtttatctcaatgtcagcgtacgtgtgcagagtcagtctgaggcgcggggagaacgtcgcccgccgtatgcggcagtatttcgtctggtcggggacaaccatcgcgcgtttgtccatttcgataaactatcggattatcttgcggaacatccggatgatgggaagctcgggtcggaggggttgctttccgggctgcgggtgatgagtgtcgatctcggccttcgcacatctgcatcgatttccgtttttcgcgttgcccggaaggacgagttgaagccgaactcaaaaggtcgtgtaccgtttttctttccgataaaagggaatgacaatctcgtcgcggttcatgagcgatcacaactcttgaagctgcctggcgaaacggagtcgaaggacctgcgtgctatccgagaagaacgccaacggacattgcggcagttgcggacgcaactggcgtatttgcggctgctcgtgcggtgtgggtcggaagatgtggggcggcgtgaacggagttgggcaaagcttatcgagcagccggtggatgcggccaatcacatgacaccggattggcgcgaggcttttgaaaacgaacttcagaagcttaagtcactccatggtatctgtagcgacaaggaatggatggatgctgtctacgagagcgttcgccgcgtgtggcgtcacatgggcaaacaggttcgcgattggcgaaaggacgtacgaagcggagagcggcccaagattcgcggctatgcgaaagacgtggtcggtggaaactcgattgagcaaatcgagtatctggaacgtcagtacaagttcctcaagagttggagcttctttggtaaggtgtcgggacaagtgattcgtgcggagaagggatctcgttttgcgatcacgctgcgcgaacacattgatcacgcgaaggaagatcggctgaagaaattggcggatcgcatcattatggaggctctcggctatgtgtacgcgttggatgagcgcggcaaaggaaagtgggttgcgaagtatccgccgtgccagctcatcctgctggaggaattgagcgagtaccagttcaataacgacaggcctccgagcgaaaacaaccagttgatgcaatggagtcatcgcggcgtgttccaggagttgataaatcaggcccaagtccatgatttactcgttgggacgatgtatgcagcgttctcgtcgcgattcgacgcgcgaactggggcaccgggtatccgctgtcgccgggttccggcgcgttgcacccaggagcacaatccagaaccatttccttggtggctgaacaagtttgtggtggaacatacgttggatgcttgtcccctacgcgcagacgacctcatcccaacgggtgaaggagagatttttgtctcgccgttcagcgcggaggagggggactttcatcagattcacgccgacctgaatgcggcgcaaaatctgcagcagcgactctggtctgattttgatatcagtcaaattcggttgcggtgtgattggggtgaagtggacggtgaactcgttctgatcccaaggcttacaggaaaacgaacggcggattcatatagcaacaaggtgttttataccaatacaggtgtcacctattatgagcgagagcgggggaagaagcggagaaaggttttcgcgcaagagaaattgtcggaggaagaggcggagttgctcgtggaagcagacgaggcgagggagaaatcggtcgttttgatgcgtgatccgtctggcatcatcaatcggggaaattggaccaggcaaaaggaattttggtcgatggtgaaccagcggatcgaaggatacttggtcaagcagattcgctcgcgcgttccattacaagatagtgcgtgtgaaaacacgggggatatttaacggcaaatgggatttctcgcaatttcggacgagcttgcggtgtttagaagtctctcaatcggctcagactggtcatagattgacagcgcggttatggcaccagactgtaggtggagtgagggacatggccgtaccgattcggatgctgaatgaactctcttattgcgaacgtttatatcatttgatcatgtgcaagggttattcgaaaaatctgcggacacagtggaaggcagcggtcagcacgaccgggcggaacgccgcaaaagaccatcagacgtggggcatgatgtgtgggatattgcaccgcagagcctccatctcggcgacgaggatttggggattgtgggcaaattggatgcgattcgctatcaggacgacgggtattgggagcccgttgaagcgaaacattcaagcgcaccaaacggtggcacttcatttcgcctcggcgagtgggaattggacggcaaggcgtggccgaatgaccagatacagttgtgtgcacaaggattgttactgagagccaacggatttccgaccattgcgggtaagttgttctaccgaggaaacagacagacggtaaggattgtattttcggatgatttgattgctgcaacggttgccaccatccggagagcacacgagttggaacaggcttcgatgccctcgccactgctgaattccgacaagtgcttccgatgctcgttgaatggtgtctgtcttcctgacgaaacgattcgcttgacgagtccggacggagagaccgttccgatacgagatattgtccccagtcgagatgatttaggaaccgtgtacgtgtcggagcctgggacccgggtcggaaagcgtggttacgagttgaccatcacgtcgaaagatgggatggaatcgaccgttccgttaaaagatgttcggcacatctccctcttcgggaacgttcagatttccacccaattggtgcacgattgtatggagtccggcgtcaccatcagctacttgactgccgccggccgtctcgtcgggatgaaccacaatttgatttcgaaaaacgtcttggtgcggcgtgaacagttcaagcggtttggggacgagcgtgatcgactgacacttgcgaggtatatcgttcgcgcgaaaattctcaaccagcgcaccttgcttcgtcgaaatgcgcacgggctcgacaaggtcattttgaaagatttgctcgatcacgcccgacgttccgaagaagccacttccattgactcgttgctcggcattgaagggattgcggcgaaacagtacatgcaggcgtttgtgctgatgctgaaagtaaaaggcgttcctgcgggcgaaacgctgatgaacggcagaaatcgccgcccaccgaaggacccggttaatgcgttgctgtcacttggatattcgttgttgcaacgggatatgtatgccgccttggctgcagtgggcctggaccccttgatgggcttttaccatcgcattgaaacggggcgtccgtcactggtactcgacatgatggaaccgtttcgagcgatcatcgcggattcggtggtcgttcgaacattgaacaccggcgaaattgcctgggatgacttttatatcgggcaggagtcctgttcgttgaagctgcctggacggaaacgattttttcaggcgtttgagcgacgcatgcacgagaccgtgacgcatccggtgttcggttacaaattgagttaccgtcggatgctggaactagaagcgcgcttcttgtcgcgatacttgatgggcgaattgccggaatatcgcccaattgtcacgaggtgatggcgatgcgccgatatgtgctggtgagctacgatatcagtgatcaaaaacgctggcgaagggtatacaaaatcgttcgaggctatggcatgcacgttcagtattcggtgttcctatgccaactcaccgatcaggatgaggccgagttgaagcaattgctattggatgtgattcatcagtcgatggatcaagtcatttttgcaaggattggaaccgtgcaggcgaaagctgccgagcggaatatgtcgtgcattgggcgggacttcgtaccattggatttgaagggattggtattttgaaggattgatgtaaacttcaaatacgcgtaaaatataatctgtctagaggacagaatttttcaacgggtgtgccaatggccactttccaggtggcaaagcccgttgagcttctcaaaaagaacgctcgctcagtgttctgacctttcgagcgcctgttcagggcgaaaaccctgggaggcgctcgaatcataggtgggacaagggattcgcggcgaaaacgacgggagagaacgagaatgaaacgagatgaaatcgatgggaaacatcaagtgctcgtttatgggcttggatctccgcgtggttcaagggctgcgagcgcccgctgtcggatcactgagcgagcgatctgagaagtggcactgtttggtaaaggtaaaaagacgaatgatgcatccgtcggatcactgagcgagcgatctgagaagtggcaccctttataaaaaggggcgtcctttagtaccgtgtactgtcggatcactgagcgagcgatctgagaagtggcacaagccttgagtaattcgccgtgggattccccgccgtatgtcggatcactgagcgagcgatctgagaagtggcactaatgaagttaaaggagatgagacaatgaaagaagtcggatcactgagcgagcgatctgagaagtggcactgcaatgcgttggattatgacgatgcaggccaaggaagtcggatcactgagcgagcgatctgagaagtggcactgatgtcagcgaaacgaccaccatcggggttataacagctttaatgcggtagtttatcacagttaaattgctaacgcagtcaggcaccgtgtatgaaatctaacaatgcgctcatcgtcatcctcggcaccgtcaccctggatgctgtaggcataggcttggttatgccggtactgccgggcctcttgcgggatatcgtccattccgacagcatcgccagtcactatggcgtgctgctagcgctatatgcgttgatgcaatttctatgcgcacccgttctcggagcactgtccgaccgctttggccgccgcccagtcctgctcgcttcgctacttggagccactatcgactacgcgatcatggcgaccacacccgtcctgtggatcctctacgccggacgcatcgtggccggcatcaccggcgccacaggtgcggttgctggcgcctatatcgccgacatcaccgatggggaagatcgggctcgccacttcgggctcatgagcgcttgtttcggcgtgggtatggtggcaggccccgtggccgggggactgttgggcgccatctccttgcatgcaccattccttgcggcggcggtgctcaacggcctcaacctactactgggctgcttcctaatgcaggagtcgcataagggagagcgtcgaccgatgcccttgagagccttcaacccagtcagctccttccggtgggcgcggggcatgactatcgtcgccgcacttatgactgtcttctttatcatgcaactcgtaggacaggtgccggcagcgctctgggtcattttcggcgaggaccgctttcgctggagcgcgacgatgatcggcctgtcgcttgcggtattcggaatcttgcacgccctcgctcaagccttcgtcactggtcccgccaccaaacgtttcggcgagaagcaggccattatcgccggcatggcggccgacgcgctgggctacgtcttgctggcgttcgcgacgcgaggctggatggccttccccattatgattcttctcgcttccggcggcatcgggatgcccgcgttgcaggccatgctgtccaggcaggtagatgacgaccatcagggacagcttcaaggatcgctcgcggctcttaccagcctaacttcgatcattggaccgctgatcgtcacggcgatttatgccgcctcggcgagcacatggaacgggttggcatggattgtaggcgccgccctataccttgtctgcctccccgcgttgcgtcgcggtgcatggagccgggccacctcgacctgaatggaagccggcggcacctcgctaacggattcaccactccaagaattggagccaatcaattcttgcggagaactgtgaatgcgcaaaccaacccttggcagaacatatccatcgcgtccgccatctccagcagccgcacgcggcgcatctcgggcagcgttgggtcctggccacgggtgcgcatgatcgtgctcctgtcgttgaggacccggctaggctggcggggttgccttactggttagcagaatgaatcaccgatacgcgagcgaacgtgaagcgactgctgctgcaaaacgtctgcgacctgagcaacaacatgaatggtcttcggtttccgtgtttcgtaaagtctggaaacgcggaagtcccctacgtgctgctgaagttgcccgcaacagagagtggaaccaaccggtgataccacgatactatgactgagagtcaacgccatgagcggcctcatttcttattctgagttacaacagtccgcaccgctgtccggtagctccttccggtgggcgcggggcatgactatcgtcgccgcacttatgactgtcttctttatcatgcaactcgtaggacaggtgccggcagcgcccaacagtcccccggccacggggcctgccaccatacccacgccgaaacaagcgccctgcaccattatgttccggatctgcatcgcaggatgctgctggctaccctgtggaacacctacatctgtattaacgaagcgctaaccgtttttatcaggctctgggaggcagaataaatgatcatatcgtcaattattacctccacggggagagcctgagcaaactggcctcaggcatttgagaagcacacggtcacactgcttccggtagtcaataaaccggtaaaccagcaatagacataagcggctatttaacgaccctgccctgaaccgacgaccgggtcgaatttgctttcgaatttctgccattcatccgcttattatcacttattcaggcgtagcaccaggcgtttaagggcaccaataactgccttaaaaaaattacgccccgccctgccactcatcgcagtactgttgtaattcattaagcattctgccgacatggaagccatcacagacggcatgatgaacctgaatcgccagcggcatcagcaccttgtcgccttgcgtataatatttgcccatggtgaaaacgggggcgaagaagttgtccatattggccacgtttaaatcaaaactggtgaaactcacccagggattggctgagacgaaaaacatattctcaataaaccctttagggaaataggccaggttttcaccgtaacacgccacatcttgcgaatatatgtgtagaaactgccggaaatcgtcgtggtattcactccagagcgatgaaaacgtttcagtttgctcatggaaaacggtgtaacaagggtgaacactatcccatatcaccagctcaccgtctttcattgccatacg

SEQ ID NO: 1168 - DNA, 20 bp, Artificial Sequence
  Description of Artificial Sequence: Synthetic oligonucleotide
gccctgcaaggcggtttttt

SEQ ID NO: 1169 - DNA, 32 bp, Artificial Sequence
  Description of Artificial Sequence: Synthetic oligonucleotide
catcaaggaattgagcttatagaagccatagc

SEQ ID NO: 1170 - DNA, 29 bp, Artificial Sequence
  Description of Artificial Sequence: Synthetic oligonucleotide
tgatgctccaagtgatgcaatcatccaag

SEQ ID NO: 1171 - DNA, 29 bp, Artificial Sequence
  Description of Artificial Sequence: Synthetic oligonucleotide
aaccatgtgaaccagccacataaaatgtg

SEQ ID NO: 1172 - DNA, 48 bp, Artificial Sequence
  Description of Artificial Sequence: Synthetic oligonucleotide
atgtcaatttatcaagaataaatatagtttaagtaaaatgtcagtaaa

SEQ ID NO: 1173 - DNA, 33 bp, Artificial Sequence
  Description of Artificial Sequence: Synthetic oligonucleotide
aggagatattaagttcggtttgtattagcgaag

SEQ ID NO: 1174 - DNA, 31 bp, Artificial Sequence
  Description of Artificial Sequence: Synthetic oligonucleotide
tcctctataattcaagccaaacataatcgct

SEQ ID NO: 1175 - DNA, 35 bp, Artificial Sequence
  Description of Artificial Sequence: Synthetic oligonucleotide
taatactattattggtggtaaatttgtaaatggtg

SEQ ID NO: 1176 - DNA, 26 bp, Artificial Sequence
  Description of Artificial Sequence: Synthetic oligonucleotide
tgaggagtgctactttgagctagcga

SEQ ID NO: 1177 - DNA, 27 bp, Artificial Sequence
  Description of Artificial Sequence: Synthetic oligonucleotide
gattccaaaagaaatttaaaatattag

SEQ ID NO: 1178 - DNA, 50 bp, Artificial Sequence
  Description of Artificial Sequence: Synthetic oligonucleotide
acttctatatgaatcttttagtaaggtgtgtatgattccaaaaatattag

SEQ ID NO: 1179 - DNA, 40 bp, Artificial Sequence
  Description of Artificial Sequence: Synthetic oligonucleotide
tgaagatatacttagaaatcattccacacatatgaacata

SEQ ID NO: 1180 - DNA, 25 bp, Artificial Sequence
  Description of Artificial Sequence: Synthetic oligonucleotide
ggtaaaggtgaggcagtatcgtaaa

SEQ ID NO: 1181 - DNA, 26 bp, Artificial Sequence
  Description of Artificial Sequence: Synthetic oligonucleotide
ctgggggagtgcttagagcttatcag

SEQ ID NO: 1182 - DNA, 24 bp, Artificial Sequence
  Description of Artificial Sequence: Synthetic oligonucleotide
tgccaatggttcatattgggtggg

SEQ ID NO: 1183 - DNA, 35 bp, Artificial Sequence
  Description of Artificial Sequence: Synthetic oligonucleotide
cataaaaattgattcataaaactcacttattgatt

SEQ ID NO: 1184 - DNA, 28 bp, Artificial Sequence
  Description of Artificial Sequence: Synthetic oligonucleotide
atttttgtctccaagagatgggctatga

SEQ ID NO: 1185 - DNA, 28 bp, Artificial Sequence
  Description of Artificial Sequence: Synthetic oligonucleotide
taaaaacagaggttctctacccgatact

SEQ ID NO: 1186 - DNA, 18 bp, Artificial Sequence
  Description of Artificial Sequence: Synthetic oligonucleotide
ggcaagggcacctagaag

SEQ ID NO: 1187 - DNA, 29 bp, Artificial Sequence
  Description of Artificial Sequence: Synthetic oligonucleotide
ggttatgcgattcatagagaacaagaggt

SEQ ID NO: 1188 - DNA, 29 bp, Artificial Sequence
  Description of Artificial Sequence: Synthetic oligonucleotide
tcgctaaatacttccagtaaaaaaacaga

SEQ ID NO: 1189 - DNA, 21 bp, Artificial Sequence
  Description of Artificial Sequence: Synthetic oligonucleotide
ttgcgtcagttggcacatact

SEQ ID NO: 1190 - DNA, 3912 bp, Artificial Sequence
  Description of Artificial Sequence: Synthetic polynucleotide
gccaccatgaacatcaaaaactttaccgggctctaccccctcagcaaaactttgcgctttgaactcaagcctattggcaaaaccaaggaaaacatcgagaaaaatggcatcctgaccaaggacgagcaacgggctaaagactacctcatagtcaaaggctttattgacgagtatcacaagcagttcatcaaagacaggctttgggactttaaattgcctctcgaaagtgagggggagaagaacagtctcgaagaataccaggaactgtacgagctcactaagcgcaacgatgcccaggaggccgacttcaccgagattaaagataaccttcgcagctctattaccgaacagctcacgaagtctggatctgcgtacgatcggatttttaaaaaagagttcattagagaagacctggtcaacttcctcgaagatgaaaaagataaaaatatcgtgaaacagttcgaggactttactacatattttacgggtttttatgaaaataggaagaacatgtactctagcgaagagaagtccacggccatcgcataccggcttatccatcagaatctgccaaaattcatggacaacatgagaagttttgccaaaattgcaaattccagtgtttccgagcactttagcgacatctatgaaagctggaaggaatatctgaatgtaaatagcatcgaggaaatcttccagctcgactattttagcgaaaccttgactcagccacatattgaggtgtataactatattatcgggaagaaagtcctggaagacggaaccgagataaagggcatcaacgagtatgtgaacctctacaatcagcagcagaaagataagagtaaacgactgcctttcctggtgccactgtataagcaaattttgtctgatagggaaaaactctcctggattgctgaagagttcgacagcgacaagaagatgctgagcgctatcaccgagtcttacaaccacctgcacaacgtgttgatgggtaacgagaacgaaagcctgcgaaatctgctgctgaatattaaggactataacctggagaaaattaatatcacaaacgacttgtctctcaccgaaatctcccagaatctttttggccgatatgatgtattcacaaatgggatcaaaaacaagctgagagtgttgactccaaggaagaaaaaggagacggacgaaaattttgaggaccgcattaacaaaatttttaagacccagaagtccttcagcatcgcttttctgaacaagctgcctcagcccgaaatggaggatgggaagccccggaacattgaggactatttcattacacagggggcgattaacaccaaatctatacagaaagaagatatcttcgcccaaattgagaatgcatacgaggatgcacaggtgttcctgcaaattaaggacaccgacaacaaacttagccagaacaagacggcggtggaaaagatcaaaactttgctggacgccttgaaggaactccagcacttcatcaaaccgctgctgggctctggggaggagaacgagaaagacgaactgttctacggttccttcctggccatctgggacgaactggacaccattacaccactttataacaaagtgagaaattggctgacccgaaaaccatattcaacagaaaaaatcaaattgaatttcgacaacgctcagctgctgggagggtgggatgtcaataaagaacacgactgtgcaggtatcttgttgcggaaaaacgatagctactatctcggaattatcaataagaaaaccaaccacatctttgatacggatattacgccatcagatggcgagtgctatgacaaaatcgactacaagctccttcccggggcgaacaaaatgcttccaaaggtgttttttagtaagtcccgaatcaaagagttcgagccatcagaggccataatcaattgctataagaaggggacacacaaaaaaggaaaaaactttaacctgacggactgtcaccgcctgatcaacttttttaagacctcaatcgagaaacacgaggattggtcaaaattcggattcaagttctccgataccgaaacgtatgaggatattagcggtttttatagagaggtcgagcagcagggatacaggctgacgagccatccagtcagtgccagctatatacatagtctggtcaaggaaggaaaactgtacctcttccaaatctggaacaaggacttttctcaattctccaaggggacccctaacttgcacactctctattggaagatgctgtttgacaaacggaatcttagcgatgtggtttataagctgaatggccaggctgaagtgttctatagaaagagctccattgaacaccagaaccgaattatccaccccgctcagcatcccatcacaaataagaatgagcttaacaaaaagcacactagcaccttcaaatacgatatcatcaaagatcgcagatacacggtggataaattccagttccatgtgcccattactataaattttaaggcgaccgggcagaacaacatcaacccaatcgtccaagaggtgattcgccaaaacggtatcacccacatcataggcatcgatcgaggtgaacgccatcttctgtacctctctctcatcgatttgaaaggcaacatcatcaagcagatgactctcaacgaaattattaatgagtataagggtgtgacctataagaccaactaccataacctcctggagaagagggagaaggagcggaccgaggccagacactcctggagtagtattgaaagcataaaagaactgaaggatggatacatgtcacaggtgattcacaaaattacggacatgatggttaagtacaatgcgattgtggtcctggaggacctcaacggggggtttatgcgaggccgccagaaggtcgagaagcaggtgtaccagaaatttgaaaaaaagttgatcgacaagctgaactatctcgttgacaagaaactcgacgctaacgaggtcggcggagtactgaatgcttatcagctgaccaacaagttcgagtctttcaagaagattgggaaacaaagcggatttttgttctacatccccgcctggaacacaagcaaaatcgatcctataacagggttcgttaatctgttcaacaccaggtacgagtctatcaaggagacaaaagttttttggtctaagtttgatattatccgatacaataaagagaagaattggttcgagttcgtcttcgattacaatacctttacgactaaagcggagggaacacgcactaagtggactctgtgcacccacggcactcgcatccagacattccggaacccagaaaagaatgcccagtgggacaataaagagatcaatttgactgagtccttcaaagctctgtttgaaaagtacaagatcgatatcaccagtaatctcaaggaatccatcatgcaggaaaccgagaagaagttcttccaggaactgcataatctgctccacctgaccctgcagatgaggaatagcgttactggaaccgacatagactatttgatcagccccgttgccgatgaggatggaaatttctatgatagtcgcataaatggcaaaaattttccggagaatgccgatgccaatggcgcgtacaacatcgcacgaaagggtctgatgcttattcggcagatcaagcaagcagatccacagaagaaattcaagtttgagacaatcaccaataaagactggctgaaattcgcccaagacaagccctatcttaaagatggcagcgggaaaaggccggcggccacgaaaaaggccggccaggcaaaaaagaaaaagggatcctacccatacgatgttccagattacgcttatccctacgacgtgcctgattatgcatacccatacgatgtccccgactatgcctaa

SEQ ID NO: 1191 - protein, 1303 aa, Artificial Sequence
  Description of Artificial Sequence: Synthetic polypeptide
ATMNIKNFTGLYPLSKTLRFELKPIGKTKENIEKNGILTKDEQRAKDYLIVKGFIDEYHKQFIKDRLWDFKLPLESEGEKNSLEEYQELYELTKRNDAQEADFTEIKDNLRSSITEQLTKSGSAYDRIFKKEFIREDLVNFLEDEKDKNIVKQFEDFTTYFTGFYENRKNMYSSEEKSTAIAYRLIHQNLPKFMDNMRSFAKIANSSVSEHFSDIYESWKEYLNVNSIEEIFQLDYFSETLTQPHIEVYNYIIGKKVLEDGTEIKGINEYVNLYNQQQKDKSKRLPFLVPLYKQILSDREKLSWIAEEFDSDKKMLSAITESYNHLHNVLMGNENESLRNLLLNIKDYNLEKINITNDLSLTEISQNLFGRYDVFTNGIKNKLRVLTPRKKKETDENFEDRINKIFKTQKSFSIAFLNKLPQPEMEDGKPRNIEDYFITQGAINTKSIQKEDIFAQIENAYEDAQVFLQIKDTDNKLSQNKTAVEKIKTLLDALKELQHFIKPLLGSGEENEKDELFYGSFLAIWDELDTITPLYNKVRNWLTRKPYSTEKIKLNFDNAQLLGGWDVNKEHDCAGILLRKNDSYYLGIINKKTNHIFDTDITPSDGECYDKIDYKLLPGANKMLPKVFFSKSRIKEFEPSEAIINCYKKGTHKKGKNFNLTDCHRLINFFKTSIEKHEDWSKFGFKFSDTETYEDISGFYREVEQQGYRLTSHPVSASYIHSLVKEGKLYLFQIWNKDFSQFSKGTPNLHTLYWKMLFDKRNLSDVVYKLNGQAEVFYRKSSIEHQNRIIHPAQHPITNKNELNKKHTSTFKYDIIKDRRYTVDKFQFHVPITINFKATGQNNINPIVQEVIRQNGITHIIGIDRGERHLLYLSLIDLKGNIIKQMTLNEIINEYKGVTYKTNYHNLLEKREKERTEARHSWSSIESIKELKDGYMSQVIHKITDMMVKYNAIVVLEDLNGGFMRGRQKVEKQVYQKFEKKLIDKLNYLVDKKLDANEVGGVLNAYQLTNKFESFKKIGKQSGFLFYIPAWNTSKIDPITGFVNLFNTRYESIKETKVFWSKFDIIRYNKEKNWFEFVFDYNTFTTKAEGTRTKWTLCTHGTRIQTFRNPEKNAQWDNKEINLTESFKALFEKYKIDITSNLKESIMQETEKKFFQELHNLLHLTLQMRNSVTGTDIDYLISPVADEDGNFYDSRINGKNFPENADANGAYNIARKGLMLIRQIKQADPQKKFKFETITNKDWLKFAQDKPYLKDGSGKRPAATKKAGQAKKKKGSYPYDVPDYAYPYDVPDYAYPYDVPDYA

SEQ ID NO: 1192 - DNA, 112 bp, Artificial Sequence
  Description of Artificial Sequence: Synthetic polynucleotide
  modified_base (30)..(37): a, c, t, g, unknown or other
ggccagtgaattcgagctcggtacccgggnnnnnnnngagaagtcatttaataaggccactgttaaaaagcttggcgtaatcatggtcatagctgtttcctgtgtgaaattg

SEQ ID NO: 1193 - DNA, 112 bp, Artificial Sequence; identical to SEQ ID NO: 1192
  Description of Artificial Sequence: Synthetic polynucleotide
  modified_base (30)..(37): a, c, t, g, unknown or other

SEQ ID NO: 1194 - DNA, 21 bp, Artificial Sequence
  Description of Artificial Sequence: Synthetic oligonucleotide
ggccagtgaattcgagctcgg

SEQ ID NO: 1195 - DNA, 28 bp, Artificial Sequence
  Description of Artificial Sequence: Synthetic oligonucleotide
ccagtatcgacaaaggacacactttaac

SEQ ID NO: 1196 - RNA, 81 nt, Artificial Sequence
  Description of Artificial Sequence: Synthetic oligonucleotide
aaguucuuagagauauuuaaaaauaugacuguuguuauauaucaaaaugcuaaaaaaaucauagauuuuaggucuuuuuuu

SEQ ID NO: 1197 - RNA, 81 nt, Artificial Sequence; identical to SEQ ID NO: 1196
  Description of Artificial Sequence: Synthetic oligonucleotide

SEQ ID NO: 1198 - RNA, 81 nt, Artificial Sequence; identical to SEQ ID NO: 1196
  Description of Artificial Sequence: Synthetic oligonucleotide

SEQ ID NO: 1199 - RNA, 81 nt, Artificial Sequence; identical to SEQ ID NO: 1196
  Description of Artificial Sequence: Synthetic oligonucleotide

SEQ ID NO: 1200 - RNA, 81 nt, Artificial Sequence; identical to SEQ ID NO: 1196
  Description of Artificial Sequence: Synthetic oligonucleotide

SEQ ID NO: 1201 - RNA, 81 nt, Artificial Sequence; identical to SEQ ID NO: 1196
  Description of Artificial Sequence: Synthetic oligonucleotide

SEQ ID NO: 1202 - DNA, 14 bp, Artificial Sequence
  Description of Artificial Sequence: Synthetic oligonucleotide
aattttttagatct

SEQ ID NO: 1203 - RNA, 81 nt, Artificial Sequence; identical to SEQ ID NO: 1196
  Description of Artificial Sequence: Synthetic oligonucleotide

SEQ ID NO: 1204 - protein, 48 aa, Artificial Sequence
  Description of Artificial Sequence: Synthetic polypeptide
SYYKYGNEKVLRGYEGVLLSILKDENLVSMRTLLNSRPMLVYRPKESS

SEQ ID NO: 1205 - RNA, 81 nt, Artificial Sequence; identical to SEQ ID NO: 1196
  Description of Artificial Sequence: Synthetic oligonucleotide

SEQ ID NO: 1206 - RNA, 81 nt, Artificial Sequence; identical to SEQ ID NO: 1196
  Description of Artificial Sequence: Synthetic oligonucleotide

SEQ ID NO: 1207 - DNA, 102 bp, Artificial Sequence
  Description of Artificial Sequence: Synthetic polynucleotide
ctctaagaactttaaataattctactgttgtagatgagaagtcatttaataaggccactgttaaaagtctaagaactttaaataatttctactgttgtagat

SEQ ID NO: 1208 - DNA, 102 bp, Artificial Sequence; identical to SEQ ID NO: 1207
  Description of Artificial Sequence: Synthetic polynucleotide

SEQ ID NO: 1209 - DNA, 34 bp, Artificial Sequence; identical to SEQ ID NO: 119
  Description of Artificial Sequence: Synthetic oligonucleotide

SEQ ID NO: 1210 - RNA, 28 nt, Artificial Sequence
  Description of Artificial Sequence: Synthetic oligonucleotide
acuuuaaauaauuucuacuguuguagau

SEQ ID NO: 1211 - RNA, 35 nt, Artificial Sequence
  Description of Artificial Sequence: Synthetic oligonucleotide
gagaagucauuuaauaaggccacuguuaaaaagcu

SEQ ID NO: 1212 - RNA, 17 nt, Artificial Sequence
  Description of Artificial Sequence: Synthetic oligonucleotide
gucuaagaacuuuaaau

SEQ ID NO: 1213 - RNA, 28 nt, Artificial Sequence
  Description of Artificial Sequence: Synthetic oligonucleotide
acuuuaaauaauuucuacuguuguagau

SEQ ID NO: 1214 - RNA, 31 nt, Artificial Sequence
  Description of Artificial Sequence: Synthetic oligonucleotide
gagaagucauuuaauaaggccacuguuaaaa

SEQ ID NO: 1215 - RNA, 17 nt, Artificial Sequence
  Description of Artificial Sequence: Synthetic oligonucleotide
gucuaagaacuuuaaau

SEQ ID NO: 1216 - RNA, 28 nt, Artificial Sequence
  Description of Artificial Sequence: Synthetic oligonucleotide
acuuuaaauaauuucuacuguuguagau

SEQ ID NO: 1217 - RNA, 30 nt, Artificial Sequence
  Description of Artificial Sequence: Synthetic oligonucleotide
gagaagucauuuaauaaggccacuguuaaa

SEQ ID NO: 1218 - RNA, 17 nt, Artificial Sequence
  Description of Artificial Sequence: Synthetic oligonucleotide
gucuaagaacuuuaaau

SEQ ID NO: 1219 - RNA, 28 nt, Artificial Sequence
  Description of Artificial Sequence: Synthetic oligonucleotide
acuuuaaauaauuucuacuguuguagau

SEQ ID NO: 1220 - RNA, 27 nt, Artificial Sequence
  Description of Artificial Sequence: Synthetic oligonucleotide
gagaagucauuuaauaaggccacuguu

SEQ ID NO: 1221 - RNA, 17 nt, Artificial Sequence
  Description of Artificial Sequence: Synthetic oligonucleotide
gucuaagaacuuuaaau

SEQ ID NO: 1222 - RNA, 28 nt, Artificial Sequence
  Description of Artificial Sequence: Synthetic oligonucleotide
acuuuaaauaauuucuacuguuguagau

SEQ ID NO: 1223 - RNA, 24 nt, Artificial Sequence
  Description of Artificial Sequence: Synthetic oligonucleotide
gagaagucauuuaauaaggccacu

SEQ ID NO: 1224 - RNA, 17 nt, Artificial Sequence
  Description of Artificial Sequence: Synthetic oligonucleotide
gucuaagaacuuuaaau

SEQ ID NO: 1225 - RNA, 28 nt, Artificial Sequence
  Description of Artificial Sequence: Synthetic oligonucleotide
acuuuaaauaauuucuacuguuguagau

SEQ ID NO: 1226 - RNA, 20 nt, Artificial Sequence
  Description of Artificial Sequence: Synthetic oligonucleotide
gagaagucauuuaauaaggc

SEQ ID NO: 1227 - RNA, 17 nt, Artificial Sequence
  Description of Artificial Sequence: Synthetic oligonucleotide
gucuaagaacuuuaaau

SEQ ID NO: 1228 - RNA, 28 nt, Artificial Sequence
  Description of Artificial Sequence: Synthetic oligonucleotide
acuuuaaauaauuucuacuguuguagau

SEQ ID NO: 1229 - RNA, 17 nt, Artificial Sequence
  Description of Artificial Sequence: Synthetic oligonucleotide
gagaagucauuuaauaa

SEQ ID NO: 1230 - RNA, 17 nt, Artificial Sequence
  Description of Artificial Sequence: Synthetic oligonucleotide
gucuaagaacuuuaaau

SEQ ID NO: 1231 - RNA, 28 nt, Artificial Sequence
  Description of Artificial Sequence: Synthetic oligonucleotide
acuuuaaauaauuucuacuguuguagau

SEQ ID NO: 1232 - RNA, 14 nt, Artificial Sequence
  Description of Artificial Sequence: Synthetic oligonucleotide
gagaagucauuuaa

SEQ ID NO: 1233 - RNA, 17 nt, Artificial Sequence
  Description of Artificial Sequence: Synthetic oligonucleotide
gucuaagaacuuuaaau

SEQ ID NO: 1234 - RNA, 28 nt, Artificial Sequence
  Description of Artificial Sequence: Synthetic oligonucleotide
acuuuaaauaauuucuacuguuguagau

SEQ ID NO: 1235 - RNA, 27 nt, Artificial Sequence
  Description of Artificial Sequence: Synthetic oligonucleotide
agucauuuaauaaggccacuguuaaaa

SEQ ID NO: 1236 - RNA, 17 nt, Artificial Sequence
  Description of Artificial Sequence: Synthetic oligonucleotide
gucuaagaacuuuaaau

SEQ ID NO: 1237 - RNA, 28 nt, Artificial Sequence
  Description of Artificial Sequence: Synthetic oligonucleotide
acuuuaaauaauuucuacuguuguagau

SEQ ID NO: 1238 - RNA, 24 nt, Artificial Sequence
  Description of Artificial Sequence: Synthetic oligonucleotide
cauuuaauaaggccacuguuaaaa

SEQ ID NO: 1239 - RNA, 17 nt, Artificial Sequence
  Description of Artificial Sequence: Synthetic oligonucleotide
gucuaagaacuuuaaau

SEQ ID NO: 1240 - RNA, 28 nt, Artificial Sequence
  Description of Artificial Sequence: Synthetic oligonucleotide
acuuuaaauaauuucuacuguuguagau

SEQ ID NO: 1241 - RNA, 20 nt, Artificial Sequence
  Description of Artificial Sequence: Synthetic oligonucleotide
uaauaaggccacuguuaaaa

SEQ ID NO: 1242 - RNA, 17 nt, Artificial Sequence
  Description of Artificial Sequence: Synthetic oligonucleotide
gucuaagaacuuuaaau

SEQ ID NO: 1243 - RNA, 28 nt, Artificial Sequence
  Description of Artificial Sequence: Synthetic oligonucleotide
acuuuaaauaauuucuacuguuguagau

SEQ ID NO: 1244 - RNA, 17 nt, Artificial Sequence
  Description of Artificial Sequence: Synthetic oligonucleotide
uaaggccacuguuaaaa

SEQ ID NO: 1245 - RNA, 17 nt, Artificial Sequence
  Description of Artificial Sequence: Synthetic oligonucleotide
gucuaagaacuuuaaau

SEQ ID NO: 1246 - RNA, 28 nt, Artificial Sequence
  Description of Artificial Sequence: Synthetic oligonucleotide
acuuuaaauaauuucuacuguuguagau

SEQ ID NO: 1247 - RNA, 14 nt, Artificial Sequence
  Description of Artificial Sequence: Synthetic oligonucleotide
ggccacuguuaaaa

SEQ ID NO: 1248 - RNA, 17 nt, Artificial Sequence
  Description of Artificial Sequence: Synthetic oligonucleotide
gucuaagaacuuuaaau

SEQ ID NO: 1249 - DNA, 102 bp, Artificial Sequence; identical to SEQ ID NO: 1207
  Description of Artificial Sequence: Synthetic polynucleotide

SEQ ID NO: 1250 - DNA, 3849 bp, Artificial Sequence
  Description of Artificial Sequence: Synthetic polynucleotide
ggtaccatggattacggcaacggccagtttgagcggagagcccccctgaccaagacaatcaccctgcgcctgaagcctatcggcgagacacgggagacaatccgcgagcagaagctgctggagcaggacgccgccttcagaaagctggtggagacagtgacccctatcgtggacgattgtatcaggaagatcgccgataacgccctgtgccactttggcaccgagtatgacttcagctgtctgggcaacgccatctctaagaatgacagcaaggccatcaagaaggagacagagaaggtggagaagctgctggccaaggtgctgaccgagaatctgccagatggcctgcgcaaggtgaacgacatcaattccgccgcctttatccaggatacactgacctctttcgtgcaggacgatgccgacaagcgggtgctgatccaggagctgaagggcaagaccgtgctgatgcagcggttcctgaccacacggatcacagccctgaccgtgtggctgcccgacagagtgttcgagaactttaatatcttcatcgagaacgccgagaagatgagaatcctgctggactcccctctgaatgagaagatcatgaagtttgacccagatgccgagcagtacgcctctctggagttctatggccagtgcctgtctcagaaggacatcgatagctacaacctgatcatctccggcatctatgccgacgatgaggtgaagaaccctggcatcaatgagatcgtgaaggagtacaatcagcagatccggggcgacaaggatgagtccccactgcccaagctgaagaagctgcacaagcagatcctgatgccagtggagaaggccttctttgtgcgcgtgctgtctaacgacagcgatgcccggagcatcctggagaagatcctgaaggacacagagatgctgccctccaagatcatcgaggccatgaaggaggcagatgcaggcgacatcgccgtgtacggcagccggctgcacgagctgagccacgtgatctacggcgatcacggcaagctgtcccagatcatctatgacaaggagtccaagaggatctctgagctgatggagacactgtctccaaaggagcgcaaggagagcaagaagcggctggagggcctggaggagcacatcagaaagtctacatacaccttcgacgagctgaacaggtatgccgagaagaatgtgatggcagcatacatcgcagcagtggaggagtcttgtgccgagatcatgagaaaggagaaggatctgaggaccctgctgagcaaggaggacgtgaagatccggggcaacagacacaatacactgatcgtgaagaactactttaatgcctggaccgtgttccggaacctgatcagaatcctgaggcgcaagtccgaggccgagatcgactctgacttctacgatgtgctggacgattccgtggaggtgctgtctctgacatacaagggcgagaatctgtgccgcagctatatcaccaagaagatcggctccgacctgaagcccgagatcgccacatacggcagcgccctgaggcctaacagccgctggtggtccccaggagagaagtttaatgtgaagttccacaccatcgtgcggagagatggccggctgtactatttcatcctgcccaagggcgccaagcctgtggagctggaggacatggatggcgacatcgagtgtctgcagatgagaaagatccctaacccaacaatctttctgcccaagctggtgttcaaggaccctgaggccttctttagggataatccagaggccgacgagttcgtgtttctgagcggcatgaaggcccccgtgacaatcaccagagagacatacgaggcctacaggtataagctgtataccgtgggcaagctgcgcgatggcgaggtgtccgaagaggagtacaagcgggccctgctgcaggtgctgaccgcctacaaggagtttctggagaacagaatgatctatgccgacctgaatttcggctttaaggatctggaggagtataaggacagctccgagtttatcaagcaggtggagacacacaacaccttcatgtgctgggccaaggtgtctagctcccagctggacgatctggtgaagtctggcaacggcctgctgttcgagatctggagcgagcgcctggagtcctactataagtacggcaatgagaaggtgctgcggggctatgagggcgtgctgctgagcatcctgaaggatgagaacctggtgtccatgcggaccctgctgaacagccggcccatgctggtgtaccggccaaaggagtctagcaagcctatggtggtgcaccgggatggcagcagagtggtggacaggtttgataaggacggcaagtacatcccccctgaggtgcacgacgagctgtatcgcttctttaacaatctgctgatcaaggagaagctgggcgagaaggcccggaagatcctggacaacaagaaggtgaaggtgaaggtgctggagagcgagagagtgaagtggtccaagttctacgatgagcagtttgccgtgaccttcagcgtgaagaagaacgccgattgtctggacaccacaaaggacctgaatgccgaagtgatggagcagtatagcgagtccaacagactgatcctgatcaggaataccacagatatcctgtactatctggtgctggacaagaatggcaaggtgctgaagcagagatccctgaacatcatcaatgacggcgccagggatgtggactggaaggagaggttccgccaggtgacaaaggatagaaacgagggctacaatgagtgggattattccaggacctctaacgacctgaaggaggtgtacctgaattatgccctgaaggagatcgccgaggccgtgatcgagtacaacgccatcctgatcatcgagaagatgtctaatgcctttaaggacaagtatagcttcctggacgacgtgaccttcaagggcttcgagacaaagctgctggccaagctgagcgatctgcactttaggggcatcaaggacggcgagccatgttccttcacaaaccccctgcagctgtgccagaacgattctaataagatcctgcaggacggcgtgatctttatggtgccaaattctatgacacggagcctggaccccgacaccggcttcatctttgccatcaacgaccacaatatcaggaccaagaaggccaagctgaactttctgagcaagttcgatcagctgaaggtgtcctctgagggctgcctgatcatgaagtacagcggcgattccctgcctacacacaacaccgacaatcgcgtgtggaactgctgttgcaatcacccaatcacaaactatgaccgggagacaaagaaggtggagttcatcgaggagcccgtggaggagctgtcccgcgtgctggaggagaatggcatcgagacagacaccgagctgaacaagctgaatgagcgggagaacgtgcctggcaaggtggtggatgccatctactctctggtgctgaattatctgcgcggcacagtgagcggagtggcaggacagagggccgtgtactatagccctgtgaccggcaagaagtacgatatctcctttatccaggccatgaacctgaataggaagtgtgactactataggatcggctccaaggagaggggagagtggaccgatttcgtggcccagctgatcaacaaaaggccggcggccacgaaaaaggccggccaggcaaaaaagaaaaagggatcctacccatacgatgttccagattacgcttatccctacgacgtgcctgattatgcatacccatatgatgtccccgactatgcctaagaattc

SEQ ID NO: 1251 - protein, 1233 aa, Artificial Sequence; identical to SEQ ID NO: 106
  Description of Artificial Sequence: Synthetic polypeptide

SEQ ID NO: 1252 - DNA, 3873 bp, Artificial Sequence
  Description of Artificial Sequence: Synthetic polynucleotide
ggtaccatgctgctgtatgagaactacaccaagcggaatcagatcacaaagagcctgaggctggagctgcgccctcagggcaagaccctgagaaacatcaaggagctgaatctgctggagcaggacaaggccatctacgccctgctggagcggctgaagccagtgatcgatgagggcatcaaggacatcgccagagataccctgaagaactgcgagctgtcttttgagaagctgtacgagcacttcctgagcggcgacaagaaggcctatgccaaggagtccgagcggctgaagaaggagatcgtgaaaaccctgatcaagaacctgcccgagggcatcggcaagatctctgagatcaacagcgccaagtatctgaatggcgtgctgtacgacttcatcgataagacacacaaggactctgaggagaagcagaatatcctgagcgatatcctggagacaaagggctacctggccctgttctccaagtttctgacatctcggatcaccacactggagcagtccatgcctaagagagtgatcgagaacttcgagatctatgccgccaatatcccaaagatgcaggacgccctggagaggggagccgtgtcttttgccatcgagtacgagagcatctgttccgtggattactataaccagatcctgtcccaggaggacatcgattcttataatcgcctgatcagcggcatcatggacgaggatggcgccaaggagaagggcatcaaccagaccatctccgagaagaatatcaagatcaagtctgagcacctggaggagaagcccttcagaatcctgaagcagctgcacaagcagatcctggaggagcgcgagaaggcctttacaatcgaccacatcgacagcgatgaggaggtggtgcaggtgaccaaggaggccttcgagcagacaaaggagcagtgggagaacatcaagaagatcaatggcttctacgccaaggaccccggcgatatcaccctgtttatcgtggtgggccctaaccagacacacgtgctgtcccagctgatctacggcgagcacgaccggatcagactgctgctggaggagtatgagaagaacaccctggaggtgctgccccggagaacaaagtctgagaaggccagatacgataagttcgtgaatgccgtgcctaagaaggtggccaaggagagccacaccttcgacggcctgcagaagatgacaggcgacgatcggctgtttatcctgtatagagatgagctggcccggaactacatgagaatcaaggaggcctatggcacctttgagcgggacatcctgaagagcaggcgcggcatcaagggcaatcgggacgtgcaggagtctctggtgagcttttacgatgagctgacaaagttcaggagcgccctgcgcatcatcaattccggcaacgacgagaaggccgatccaatcttctataacacctttgatggcatcttcgagaaggccaataggacatacaaggccgagaatctgtgccgcaactatgtgaccaagtctccagccgacgatgccaggatcatggccagctgtctgggcaccccagcaaggctgcgcacacactggtggaatggcgaggagaacttcgccatcaatgacgtggccatgatccggagaggcgatgagtactattactttgtgctgaccccagacgtgaagcccgtggacctgaaaaccaaggacgagacagatgcccagatcttcgtgcagcgcaagggcgccaagtcctttctgggcctgccaaaggccctgttcaagtgcatcctggagccttactttgagtccccagagcacaagaatgacaagaactgcgtgatcgaggagtacgtgtctaagcccctgaccatcgacaggcgcgcctatgatatctttaagaacggcaccttcaagaaaaccaatatcggcatcgacggcctgaccgaggagaagttcaaggacgattgccgctatctgatcgacgtgtataaggagttcatcgccgtgtatacaaggtacagctgttttaacatgtccggcctgaagcgcgccgacgagtacaatgatatcggcgagttcttttctgacgtggataccaggctgtgcacaatggagtggattcccgtgagcttcgagcgcatcaacgacatggtggataagaaggagggcctgctgtttctggtgaggagcatgttcctgtataaccggcccagaaagccttatgagcgcacctttatccagctgttcagcgactccaacatggagcacacatctatgctgctgaatagcagggccatgatccagtacagggcagcctccctgccacggagagtgacccacaagaagggcagcatcctggtggccctgcgggattccaacggcgagcacatccccatgcacatcagagaggccatctacaagatgaagaacaattttgacatcagctccgaggatttcatcatggccaaggcctatctggccgagcacgacgtggccatcaagaaggccaacgaggatatcatcaggaataggcgctacaccgaggacaagttctttctgtctctgagctataccaagaacgccgatatcagcgcccgcacactggactacatcaatgataaggtggaggaggacacacaggattccaggatggccgtgatcgtgacccgcaacctgaaggacctgacatacgtggccgtggtggatgagaagaacaatgtgctggaggagaagagcctgaacgagatcgacggcgtgaattatcgggagctgctgaaggagagaaccaagatcaagtaccacgacaagacacggctgtggcagtatgacgtgagcagcaagggcctgaaggaggcctacgtggagctggccgtgacccagatctccaagctggccacaaagtataacgccgtggtggtggtggagtccatgtcctctaccttcaaggacaagttctcttttctggatgagcagatcttcaaggcctttgaggcccggctgtgcgccagaatgtccgacctgtcttttaatacaatcaaggagggcgaggccggctccatctctaaccccatccaggtgtccaacaataacggcaattcttatcaggacggcgtgatctacttcctgaataacgcctatacccggaccctgtgccctgataccggctttgtggacgtgttcgataagacccggctgatcacaatgcagtctaagagacagttctttgccaagatgaaggacatcagaatcgacgatggcgagatgctgttcacctttaacctggaggagtaccctacaaagaggctgctggaccgcaaggagtggaccgtgaagatcgccggcgatggctcctatttcgacaaggataagggcgagtacgtgtacgtgaacgacatcgtgagagagcagatcatcccagccctgctggaggacaaggccgtgttcgatggcaatatggccgagaagtttctggataagaccgccatcagcggcaagtccgtggagctgatctacaagtggttcgccaacgccctgtatggcatcatcacaaagaaggacggcgagaagatctaccggagccccatcaccggcacagagatcgacgtgagcaagaacaccacatacaacttcggcaagaagttcatgttcaagcaggagtatagaggcgacggcgattttctggacgccttcctgaattacatgcaggcccaggatatcgccgtgaaaaggccggcggccacgaaaaaggccggccaggcaaaaaagaaaaagggatcctacccatacgatgttccagattacgcttatccctacgacgtgcctgattatgcatacccatatgatgtccccgactatgcctaagaattc

SEQ ID NO: 1253 - protein, 1241 aa, Artificial Sequence; identical to SEQ ID NO: 103
  Description of Artificial Sequence: Synthetic polypeptide

SEQ ID NO: 1254 - DNA, 4581 bp, Artificial Sequence
  Description of Artificial Sequence: Synthetic polynucleotide
ggtaccatgtccaacttctttaagaatttcaccaacctgtatgagctgtccaagacactgaggtttgagctgaagcccgtgggcgacaccctgacaaacatgaaggaccacctggagtacgatgagaagctgcagaccttcctgaaggatcagaatatcgacgatgcctatcaggccctgaagcctcagttcgacgagatccacgaggagtttatcacagattctctggagagcaagaaggccaaggagatcgacttctccgagtacctggatctgtttcaggagaagaaggagctgaacgactctgagaagaagctgcgcaacaagatcggcgagacattcaacaaggccggcgagaagtggaagaaggagaagtaccctcagtatgagtggaagaagggctccaagatcgccaatggcgccgacatcctgtcttgccaggatatgctgcagtttatcaagtataagaacccagaggatgagaagatcaagaattacatcgacgatacactgaagggcttctttacctatttcggcggctttaatcagaacagggccaactactatgagacaaagaaggaggcctccaccgcagtggcaacaaggatcgtgcacgagaacctgccaaagttctgtgacaatgtgatccagtttaagcacatcatcaagcggaagaaggatggcaccgtggagaaaaccgagagaaagaccgagtacctgaacgcctaccagtatctgaagaacaataacaagatcacacagatcaaggacgccgagacagagaagatgatcgagtctacacccatcgccgagaagatcttcgacgtgtactacttcagcagctgcctgagccagaagcagatcgaggagtacaaccggatcatcggccactataatctgctgatcaacctgtataaccaggccaagagatctgagggcaagcacctgagcgccaacgagaagaagtataaggacctgcctaagttcaagaccctgtataagcagatcggctgcggcaagaagaaggacctgttttacacaatcaagtgtgataccgaggaggaggccaataagtcccggaacgagggcaaggagtcccactctgtggaggagatcatcaacaaggcccaggaggccatcaataagtacttcaagtctaataacgactgtgagaatatcaacaccgtgcccgacttcatcaactatatcctgacaaaggagaattacgagggcgtgtattggagcaaggccgccatgaacaccatctccgacaagtacttcgccaattatcacgacctgcaggatagactgaaggaggccaaggtgtttcagaaggccgataagaagtccgaggacgatatcaagatcccagaggccatcgagctgtctggcctgttcggcgtgctggacagcctggccgattggcagaccacactgtttaagtctagcatcctgagcaacgaggacaagctgaagatcatcacagattcccagaccccctctgaggccctgctgaagatgatcttcaatgacatcgagaagaacatggagtcctttctgaaggagacaaacgatatcatcaccctgaagaagtataagggcaataaggagggcaccgagaagatcaagcagtggttcgactatacactggccatcaaccggatgctgaagtactttctggtgaaggagaataagatcaagggcaactccctggataccaatatctctgaggccctgaaaaccctgatctacagcgacgatgccgagtggttcaagtggtacgacgccctgagaaactatctgacccagaagcctcaggatgaggccaaggagaataagctgaagctgaatttcgacaacccatctctggccggcggctgggatgtgaacaaggagtgcagcaatttttgcgtgatcctgaaggacaagaacgagaagaagtacctggccatcatgaagaagggcgagaataccctgttccagaaggagtggacagagggccggggcaagaacctgacaaagaagtctaatccactgttcgagatcaataactgcgagatcctgagcaagatggagtatgacttttgggccgacgtgagcaagatgatccccaagtgtagcacccagctgaaggccgtggtgaaccacttcaagcagtccgacaatgagttcatctttcctatcggctacaaggtgacaagcggcgagaagtttagggaggagtgcaagatctccaagcaggacttcgagctgaataacaaggtgtttaataagaacgagctgagcgtgaccgccatgcgctacgatctgtcctctacacaggagaagcagtatatcaaggccttccagaaggagtactgggagctgctgtttaagcaggagaagcgggacaccaagctgacaaataacgagatcttcaacgagtggatcaatttttgcaacaagaagtatagcgagctgctgtcctgggagagaaagtacaaggatgccctgaccaattggatcaacttctgtaagtactttctgagcaagtatcccaagaccacactgttcaactactcttttaaggagagcgagaattataactccctggacgagttctaccgggacgtggatatctgttcttacaagctgaatatcaacaccacaatcaataagagcatcctggatagactggtggaggagggcaagctgtacctgtttgagatcaagaatcaggacagcaacgatggcaagtccatcggccacaagaataacctgcacaccatctactggaacgccatcttcgagaattttgacaacaggcctaagctgaatggcgaggccgagatcttctatcgcaaggccatctccaaggataagctgggcatcgtgaagggcaagaaaaccaagaacggcaccgagatcatcaagaattacagattcagcaaggagaagtttatcctgcacgtgccaatcaccctgaacttctgctccaataacgagtatgtgaatgacatcgtgaacacaaagttctacaatttttccaacctgcactttctgggcatcgataggggcgagaagcacctggcctactattctctggtgaataagaacggcgagatcgtggaccagggcacactgaacctgcctttcaccgacaaggatggcaatcagcgcagcatcaagaaggagaagtacttttataacaagcaggaggacaagtgggaggccaaggaggtggattgttggaattataacgacctgctggatgccatggcctctaaccgggacatggccagaaagaattggcagaggatcggcaccatcaaggaggccaagaacggctacgtgagcctggtcatcaggaagatcgccgatctggccgtgaataacgagcgccccgccttcatcgtgctggaggacctgaatacaggctttaagcggtccagacagaagatcgataagagcgtgtaccagaagttcgagctggccctggccaagaagctgaactttctggtggacaagaatgccaagcgcgatgagatcggctcccctacaaaggccctgcagctgaccccccctgtgaataactacggcgacattgagaacaagaagcaggccggcatcatgctgtatacccgggccaattatacctctcagacagatccagccacaggctggagaaagaccatctatctgaaggccggccccgaggagacaacatacaagaaggacggcaagatcaagaacaagagcgtgaaggaccagatcatcgagacattcaccgatatcggctttgacggcaaggattactatttcgagtacgacaagggcgagtttgtggatgagaaaaccggcgagatcaagcccaagaagtggcggctgtactccggcgagaatggcaagtccctggacaggttccgcggagagagggagaaggataagtatgagtggaagatcgacaagatcgatatcgtgaagatcctggacgatctgttcgtgaattttgacaagaacatcagcctgctgaagcagctgaaggagggcgtggagctgacccggaataacgagcacggcacaggcgagtccctgagattcgccatcaacctgatccagcagatccggaataccggcaataacgagagagacaacgatttcatcctgtccccagtgagggacgagaatggcaagcactttgactctcgcgagtactgggataaggagacaaagggcgagaagatcagcatgcccagctccggcgatgccaatggcgccttcaacatcgcccggaagggcatcatcatgaacgcccacatcctggccaatagcgactccaaggatctgtccctgttcgtgtctgacgaggagtgggatctgcacctgaataacaagaccgagtggaagaagcagctgaacatcttttctagcaggaaggccatggccaagcgcaagaagaaaaggccggcggccacgaaaaaggccggccaggcaaaaaagaaaaagggatcctacccatacgatgttccagattacgcttatccctacgacgtgcctgattatgcatacccatatgatgtccccgactatgcctaagaattc

SEQ ID NO: 1255 - protein, 1477 aa, Artificial Sequence; identical to SEQ ID NO: 68
  Description of Artificial Sequence: Synthetic polypeptide

SEQ ID NO: 1256 - DNA, 4206 bp, Artificial Sequence
  Description of Artificial Sequence: Synthetic polynucleotide
ggtaccatggagaacatcttcgaccagtttatcggcaagtacagcctgtccaagaccctgagattcgagctgaagcccgtgggcaagacagaggacttcctgaagatcaacaaggtgtttgagaaggatcagaccatcgacgatagctacaatcaggccaagttctattttgattccctgcaccagaagtttatcgacgccgccctggcctccgataagacatccgagctgtctttccagaactttgccgacgtgctggagaagcagaataagatcatcctggataagaagagagagatgggcgccctgaggaagcgcgacaagaacgccgtgggcatcgataggctgcagaaggagatcaatgacgccgaggatatcatccagaaggagaaggagaagatctacaaggacgtgcgcaccctgttcgataacgaggccgagtcttggaaaacctactatcaggagcgggaggtggacggcaagaagatcaccttcagcaaggccgacctgaagcagaagggcgccgattttctgacagccgccggcatcctgaaggtgctgaagtatgagttccccgaggagaaggagaaggagtttcaggccaagaaccagccctccctgttcgtggaggagaaggagaatcctggccagaagaggtacatcttcgactcttttgataagttcgccggctatctgaccaagtttcagcagacaaagaagaatctgtacgcagcagacggcaccagcacagcagtggccacccgcatcgccgataactttatcatcttccaccagaataccaaggtgttccgggacaagtacaagaacaatcacacagacctgggcttcgatgaggagaacatctttgagatcgagaggtataagaattgcctgctgcagcgcgagatcgagcacatcaagaatgagaatagctacaacaagatcatcggccggatcaataagaagatcaaggagtatcgggaccagaaggccaaggataccaagctgacaaagtccgacttccctttctttaagaacctggataagcagatcctgggcgaggtggagaaggagaagcagctgatcgagaaaacccgggagaaaaccgaggaggacgtgctgatcgagcggttcaaggagttcatcgagaacaatgaggagaggttcaccgccgccaagaagctgatgaatgccttctgtaacggcgagtttgagtccgagtacgagggcatctatctgaagaataaggccatcaacacaatctcccggagatggttcgtgtctgacagagattttgagctgaagctgcctcagcagaagtccaagaacaagtctgagaagaatgagccaaaggtgaagaagttcatctccatcgccgagatcaagaacgccgtggaggagctggacggcgatatctttaaggccgtgttctacgacaagaagatcatcgcccagggcggctctaagctggagcagttcctggtcatctggaagtacgagtttgagtatctgttccgggacatcgagagagagaacggcgagaagctgctgggctatgatagctgcctgaagatcgccaagcagctgggcatcttcccacaggagaaggaggcccgcgagaaggcaaccgccgtgatcaagaattacgccgacgccggcctgggcatcttccagatgatgaagtatttttctctggacgataaggatcggaagaacacccccggccagctgagcacaaatttctacgccgagtatgacggctactacaaggatttcgagtttatcaagtactacaacgagtttaggaacttcatcaccaagaagcctttcgacgaggataagatcaagctgaactttgagaatggcgccctgctgaagggctgggacgagaacaaggagtacgatttcatgggcgtgatcctgaagaaggagggccgcctgtatctgggcatcatgcacaagaaccaccggaagctgtttcagtccatgggcaatgccaagggcgacaacgccaatagataccagaagatgatctataagcagatcgccgacgcctctaaggatgtgcccaggctgctgctgaccagcaagaaggccatggagaagttcaagccttcccaggagatcctgagaatcaagaaggagaaaaccttcaagcgggagagcaagaacttttccctgagagatctgcacgccctgatcgagtactataggaactgcatccctcagtacagcaattggtccttttatgacttccagtttcaggataccggcaagtaccagaatatcaaggagttcacagacgatgtgcagaagtacggctataagatctcctttcgcgacatcgacgatgagtatatcaatcaggccctgaacgagggcaagatgtacctgttcgaggtggtgaacaaggatatctataacaccaagaatggctccaagaatctgcacacactgtactttgagcacatcctgtctgccgagaacctgaatgacccagtgttcaagctgtctggcatggccgagatctttcagcggcagcccagcgtgaacgaaagagagaagatcaccacacagaagaatcagtgtatcctggacaagggcgatagagcctacaagtataggcgctacaccgagaagaagatcatgttccacatgagcctggtgctgaacacaggcaagggcgagatcaagcaggtgcagtttaataagatcatcaaccagaggatcagctcctctgacaacgagatgagggtgaatgtgatcggcatcgatcgcggcgagaagaacctgctgtactatagcgtggtgaagcagaatggcgagatcatcgagcaggcctccctgaacgagatcaatggcgtgaactaccgggacaagctgatcgagagggagaaggagcgcctgaagaaccggcagagctggaagcctgtggtgaagatcaaggatctgaagaagggctacatctcccacgtgatccacaagatctgccagctgatcgagaagtattctgccatcgtggtgctggaggacctgaatatgagattcaagcagatcaggggaggaatcgagcggagcgtgtaccagcagttcgagaaggccctgatcgataagctgggctatctggtgtttaaggacaacagggatctgagggcaccaggaggcgtgctgaatggctaccagctgtctgccccctttgtgagcttcgagaagatgcgcaagcagaccggcatcctgttctacacacaggccgagtataccagcaagacagacccaatcaccggctttcggaagaacgtgtatatctctaatagcgcctccctggataagatcaaggaggccgtgaagaagttcgacgccatcggctgggatggcaaggagcagtcttacttctttaagtacaacccttacaacctggccgacgagaagtataagaactctaccgtgagcaaggagtgggccatctttgccagcgccccaagaatccggagacagaagggcgaggacggctactggaagtatgatagggtgaaagtgaatgaggagttcgagaagctgctgaaggtctggaattttgtgaacccaaaggccacagatatcaagcaggagatcatcaagaaggagaaggcaggcgacctgcagggagagaaggagctggatggccggctgagaaacttttggcactctttcatctacctgtttaacctggtgctggagctgcgcaattctttcagcctgcagatcaagatcaaggcaggagaagtgatcgcagtggacgagggcgtggacttcatcgccagcccagtgaagcccttctttaccacacccaacccttacatcccctccaacctgtgctggctggccgtggagaatgcagacgcaaacggagcctataatatcgccaggaagggcgtgatgatcctgaagaagatccgcgagcacgccaagaaggaccccgagttcaagaagctgccaaacctgtttatcagcaatgcagagtgggacgaggcagcccgggattggggcaagtacgcaggcaccacagccctgaacctggaccacaaaaggccggcggccacgaaaaaggccggccaggcaaaaaagaaaaagggatcctacccatacgatgttccagattacgcttatccctacgacgtgcctgattatgcatacccatatgatgtccccgactatgcctaagaattc

SEQ ID NO: 1257 - protein, 1352 aa, Artificial Sequence; identical to SEQ ID NO: 71
  Description of Artificial Sequence: Synthetic polypeptide

SEQ ID NO: 1258 - DNA, 3900 bp, Artificial Sequence
  Description of Artificial Sequence: Synthetic polynucleotide
ggtaccatgcagaccctgtttgagaacttcacaaatcagtacccagtgtccaagaccctgcgctttgagctgatcccccagggcaagacaaaggacttcatcgagcagaagggcctgctgaagaaggatgaggaccgggccgagaagtataagaaggtgaagaacatcatcgatgagtaccacaaggacttcatcgagaagtctctgaatggcctgaagctggacggcctggagaagtacaagaccctgtatctgaagcaggagaaggacgataaggataagaaggcctttgacaaggagaaggagaacctgcgcaagcagatcgccaatgccttccggaacaatgagaagtttaagacactgttcgccaaggagctgatcaagaacgatctgatgtctttcgcctgcgaggaggacaagaagaatgtgaaggagtttgaggccttcaccacatacttcaccggcttccaccagaaccgcgccaatatgtacgtggccgatgagaagagaacagccatcgccagcaggctgatccacgagaacctgccaaagtttatcgacaatatcaagatcttcgagaagatgaagaaggaggcccccgagctgctgtctcctttcaaccagaccctgaaggatatgaaggacgtgatcaagggcaccacactggaggagatctttagcctggattatttcaacaagaccctgacacagagcggcatcgacatctacaattccgtgatcggcggcagaacccctgaggagggcaagacaaagatcaagggcctgaacgagtacatcaataccgacttcaaccagaagcagacagacaagaagaagcggcagccaaagttcaagcagctgtataagcagatcctgagcgataggcagagcctgtcctttatcgccgaggccttcaagaacgacaccgagatcctggaggccatcgagaagttttacgtgaatgagctgctgcacttcagcaatgagggcaagtccacaaacgtgctggacgccatcaagaatgccgtgtctaacctggagagctttaacctgaccaagatgtatttccgctccggcgcctctctgacagacgtgagccggaaggtgtttggcgagtggagcatcatcaatagagccctggacaactactatgccaccacatatccaatcaagcccagagagaagtctgagaagtacgaggagaggaaggagaagtggctgaagcaggacttcaacgtgagcctgatccagaccgccatcgatgagtacgacaacgagacagtgaagggcaagaacagcggcaaagtgatcgccgattattttgccaagttctgcgacgataaggagacagacctgatccagaaggtgaacgagggctacatcgccgtgaaggatctgctgaatacaccctgtcctgagaacgagaagctgggcagcaataaggaccaggtgaagcagatcaaggcctttatggattctatcatggacatcatgcacttcgtgcgccccctgagcctgaaggataccgacaaggagaaggatgagacattctactccctgttcacacctctgtacgaccacctgacccagacaatcgccctgtataacaaggtgcggaactatctgacccagaagccttacagcacagagaagatcaagctgaacttcgagaacagcaccctgctgggcggctgggatctgaataaggagacagacaacacagccatcatcctgaggaaggataacctgtactatctgggcatcatggacaagaggcacaatcgcatctttcggaacgtgcccaaggccgataagaaggacttctgctacgagaagatggtgtataagctgctgcctggcgccaacaagatgctgccaaaggtgttcttttctcagagcagaatccaggagtttaccccttccgccaagctgctggagaactacgccaatgagacacacaagaagggcgataatttcaacctgaatcactgtcacaagctgatcgatttctttaaggactctatcaacaagcacgaggattggaagaatttcgactttaggttcagcgccacctccacctacgccgacctgagcggcttttaccacgaggtggagcaccagggctacaagatctcttttcagagcgtggccgattccttcatcgacgatctggtgaacgagggcaagctgtacctgttccagatctataataaggacttttccccattctctaagggcaagcccaacctgcacaccctgtactggaagatgctgtttgatgagaacaatctgaaggacgtggtgtataagctgaatggcgaggccgaggtgttctaccgcaagaagagcattgccgagaagaacaccacaatccacaaggccaatgagtccatcatcaacaagaatcctgataacccaaaggccaccagcaccttcaactatgatatcgtgaaggacaagagatacaccatcgacaagtttcagttccacatcccaatcacaatgaactttaaggccgagggcatcttcaacatgaatcagagggtgaatcagttcctgaaggccaatcccgatatcaacatcatcggcatcgacagaggcgagaggcacctgctgtactatgccctgatcaaccagaagggcaagatcctgaagcaggataccctgaatgtgatcgccaacgagaagcagaaggtggactaccacaatctgctggataagaaggagggcgaccgcgcaaccgcaaggcaggagtggggcgtgatcgagacaatcaaggagctgaaggagggctatctgtcccaggtcatccacaagctgaccgatctgatgatcgagaacaatgccatcatcgtgatggaggacctgaactttggcttcaagcggggcagacagaaggtggagaagcaggtgtatcagaagtttgagaagatgctgatcgataagctgaattacctggtggacaagaataagaaggcaaacgagctgggaggcctgctgaacgcattccagctggccaataagtttgagtccttccagaagatgggcaagcagaacggctttatcttctacgtgcccgcctggaatacctctaagacagatcctgccaccggctttatcgacttcctgaagccccgctatgagaacctgaatcaggccaaggatttctttgagaagtttgactctatccggctgaacagcaaggccgattactttgagttcgcctttgacttcaagaatttcaccgagaaggccgatggcggcagaaccaagtggacagtgtgcaccacaaacgaggacagatatgcctggaatagggccctgaacaataacaggggcagccaggagaagtacgacatcacagccgagctgaagtccctgttcgatggcaaggtggactataagtctggcaaggatctgaagcagcagatcgccagccaggagtccgccgacttctttaaggccctgatgaagaacctgtccatcaccctgtctctgagacacaataacggcgagaagggcgataatgagcaggactacatcctgtcccctgtggccgattctaagggccgcttctttgactcccggaaggccgacgatgacatgccaaagaatgccgacgccaacggcgcctatcacatcgccctgaagggcctgtggtgtctggagcagatcagcaagaccgatgacctgaagaaggtgaagctggccatctccaacaaggagtggctggagttcgtgcagacactgaagggcaaaaggccggcggccacgaaaaaggccggccaggcaaaaaagaaaaagggatcctacccatacgatgttccagattacgcttatccctacgacgtgcctgattatgcatacccatatgatgtccccgactatgcctaagaattc

SEQ ID NO: 1259 - protein, 1250 aa, Artificial Sequence; identical to SEQ ID NO: 98
  Description of Artificial Sequence: Synthetic polypeptide

SEQ ID NO: 1260 - DNA, 4071 bp, Artificial Sequence
  Description of Artificial Sequence: Synthetic polynucleotide
ggtaccatgacacagttcgagggctttaccaacctgtatcaggtgagcaagacactgcggtttgagctgatcccacagggcaagaccctgaagcacatccaggagcagggcttcatcgaggaggacaaggcccgcaatgatcactacaaggagctgaagcccatcatcgatcggatctacaagacctatgccgaccagtgcctgcagctggtgcagctggattgggagaacctgagcgccgccatcgactcctatagaaaggagaaaaccgaggagacaaggaacgccctgatcgaggagcaggccacatatcgcaatgccatccacgactacttcatcggccggacagacaacctgaccgatgccatcaataagagacacgccgagatctacaagggcctgttcaaggccgagctgtttaatggcaaggtgctgaagcagctgggcaccgtgaccacaaccgagcacgagaacgccctgctgcggagcttcgacaagtttacaacctacttctccggcttttatgagaacaggaagaacgtgttcagcgccgaggatatcagcacagccatcccacaccgcatcgtgcaggacaacttccccaagtttaaggagaattgtcacatcttcacacgcctgatcaccgccgtgcccagcctgcgggagcactttgagaacgtgaagaaggccatcggcatcttcgtgagcacctccatcgaggaggtgttttccttccctttttataaccagctgctgacacagacccagatcgacctgtataaccagctgctgggaggaatctctcgggaggcaggcaccgagaagatcaagggcctgaacgaggtgctgaatctggccatccagaagaatgatgagacagcccacatcatcgcctccctgccacacagattcatccccctgtttaagcagatcctgtccgataggaacaccctgtctttcatcctggaggagtttaagagcgacgaggaagtgatccagtccttctgcaagtacaagacactgctgagaaacgagaacgtgctggagacagccgaggccctgtttaacgagctgaacagcatcgacctgacacacatcttcatcagccacaagaagctggagacaatcagcagcgccctgtgcgaccactgggatacactgaggaatgccctgtatgagcggagaatctccgagctgacaggcaagatcaccaagtctgccaaggagaaggtgcagcgcagcctgaagcacgaggatatcaacctgcaggagatcatctctgccgcaggcaaggagctgagcgaggccttcaagcagaaaaccagcgagatcctgtcccacgcacacgccgccctggatcagccactgcctacaaccctgaagaagcaggaggagaaggagatcctgaagtctcagctggacagcctgctgggcctgtaccacctgctggactggtttgccgtggatgagtccaacgaggtggaccccgagttctctgcccggctgaccggcatcaagctggagatggagccttctctgagcttctacaacaaggccagaaattatgccaccaagaagccctactccgtggagaagttcaagctgaactttcagatgcctacactggcctctggctgggacgtgaataaggagaagaacaatggcgccatcctgtttgtgaagaacggcctgtactatctgggcatcatgccaaagcagaagggcaggtataaggccctgagcttcgagcccacagagaaaaccagcgagggctttgataagatgtactatgactacttccctgatgccgccaagatgatcccaaagtgcagcacccagctgaaggccgtgacagcccactttcagacccacacaacccccatcctgctgtccaacaatttcatcgagcctctggagatcacaaaggagatctacgacctgaacaatcctgagaaggagccaaagaagtttcagacagcctacgccaagaaaaccggcgaccagaagggctacagagaggccctgtgcaagtggatcgacttcacaagggattttctgtccaagtataccaagacaacctctatcgatctgtctagcctgcggccatcctctcagtataaggacctgggcgagtactatgccgagctgaatcccctgctgtaccacatcagcttccagagaatcgccgagaaggagatcatggatgccgtggagacaggcaagctgtacctgttccagatctataacaaggactttgccaagggccaccacggcaagcctaatctgcacacactgtattggaccggcctgttttctccagagaacctggccaagacaagcatcaagctgaatggccaggccgagctgttctaccgccctaagtccaggatgaagaggatggcacaccggctgggagagaagatgctgaacaagaagctgaaggatcagaaaaccccaatccccgacaccctgtaccaggagctgtacgactatgtgaatcacagactgtcccacgacctgtctgatgaggccagggccctgctgcccaacgtgatcaccaaggaggtgtctcacgagatcatcaaggataggcgctttaccagcgacaagttctttttccacgtgcctatcacactgaactatcaggccgccaattccccatctaagttcaaccagagggtgaatgcctacctgaaggagcaccccgagacacctatcatcggcatcgatcggggcgagagaaacctgatctatatcacagtgatcgactccaccggcaagatcctggagcagcggagcctgaacaccatccagcagtttgattaccagaagaagctggacaacagggagaaggagagggtggcagcaaggcaggcctggtctgtggtgggcacaatcaaggatctgaagcagggctatctgagccaggtcatccacgagatcgtggacctgatgatccactaccaggccgtggtggtgctggagaacctgaatttcggctttaagagcaagaggaccggcatcgccgagaaggccgtgtaccagcagttcgagaagatgctgatcgataagctgaattgcctggtgctgaaggactatccagcagagaaagtgggaggcgtgctgaacccataccagctgacagaccagttcacctcctttgccaagatgggcacccagtctggcttcctgttttacgtgcctgccccatatacatctaagatcgatcccctgaccggcttcgtggaccccttcgtgtggaaaaccatcaagaatcacgagagccgcaagcacttcctggagggcttcgactttctgcactacgacgtgaaaaccggcgacttcatcctgcactttaagatgaacagaaatctgtccttccagaggggcctgcccggctttatgcctgcatgggatatcgtgttcgagaagaacgagacacagtttgacgccaagggcacccctttcatcgccggcaagagaatcgtgccagtgatcgagaatcacagattcaccggcagataccgggacctgtatcctgccaacgagctgatcgccctgctggaggagaagggcatcgtgttcagggatggctccaacatcctgccaaagctgctggagaatgacgattctcacgccatcgacaccatggtggccctgatccgcagcgtgctgcagatgcggaactccaatgccgccacaggcgaggactatatcaacagccccgtgcgcgatctgaatggcgtgtgcttcgactcccggtttcagaacccagagtggcccatggacgccgatgccaatggcgcctaccacatcgccctgaagggccagctgctgctgaatcacctgaaggagagcaaggatctgaagctgcagaacggcatctccaatcaggactggctggcctacatccaggagctgcgcaacaaaaggccggcggccacgaaaaaggccggccaggcaaaaaagaaaaagggatcctacccatacgatgttccagattacgcttatccctacgacgtgcctgattatgcatacccatatgatgtccccgactatgcctaagaattc

SEQ ID NO: 1261 - protein, 1307 aa, Artificial Sequence; identical to SEQ ID NO: 77
  Description of Artificial Sequence: Synthetic polypeptide

SEQ ID NO: 1262 - DNA, 3768 bp, Artificial Sequence
  Description of Artificial Sequence: Synthetic polynucleotide
ggtaccatgtactatgagtccctgaccaagcagtaccccgtgtctaagacaatccggaatgagctgatccctatcggcaagacactggataacatccgccagaacaatatcctggagagcgacgtgaagcggaagcagaactacgagcacgtgaagggcatcctggatgagtatcacaagcagctgatcaacgaggccctggacaattgcaccctgccatccctgaagatcgccgccgagatctacctgaagaatcagaaggaggtgtctgacagagaggatttcaacaagacacaggacctgctgaggaaggaggtggtggagaagctgaaggcccacgagaactttaccaagatcggcaagaaggacatcctggatctgctggagaagctgccttccatctctgaggacgattacaatgccctggagagcttccgcaacttttacacctatttcacatcctacaacaaggtgcgggagaatctgtattctgataaggagaagagctccacagtggcctacagactgatcaacgagaatttcccaaagtttctggacaatgtgaagagctataggtttgtgaaaaccgcaggcatcctggcagatggcctgggagaggaggagcaggactccctgttcatcgtggagacattcaacaagaccctgacacaggacggcatcgatacctacaattctcaagtgggcaagatcaactctagcatcaatctgtataaccagaagaatcagaaggccaatggcttcagaaagatccccaagatgaagatgctgtataagcagatcctgtccgatagggaggagtctttcatcgacgagtttcagagcgatgaggtgctgatcgacaacgtggagtcttatggcagcgtgctgatcgagtctctgaagtcctctaaggtgagcgccttctttgatgccctgagagagtctaagggcaagaacgtgtacgtgaagaatgacctggccaagacagccatgagcaacatcgtgttcgagaattggaggacctttgacgatctgctgaaccaggagtacgacctggccaacgagaacaagaagaaggacgataagtatttcgagaagcgccagaaggagctgaagaagaataagagctactccctggagcacctgtgcaacctgtccgaggattcttgtaacctgatcgagaattatatccaccagatctccgacgatatcgagaatatcatcatcaacaatgagacattcctgcgcatcgtgatcaatgagcacgacaggtcccgcaagctggccaagaaccggaaggccgtgaaggccatcaaggactttctggattctatcaaggtgctggagcgggagctgaagctgatcaacagctccggccaggagctggagaaggatctgatcgtgtactctgcccacgaggagctgctggtggagctgaagcaggtggacagcctgtataacatgaccagaaattatctgacaaagaagcctttctctaccgagaaggtgaagctgaactttaatcgcagcacactgctgaacggctgggatcggaataaggagacagacaacctgggcgtgctgctgctgaaggacggcaagtactatctgggcatcatgaacacaagcgccaataaggccttcgtgaatccccctgtggccaagaccgagaaggtgtttaagaaggtggattacaagctgctgccagtgcccaaccagatgctgccaaaggtgttctttgccaagagcaatatcgacttctataacccctctagcgagatctactccaattataagaagggcacccacaagaagggcaatatgttttccctggaggattgtcacaacctgatcgacttctttaaggagtctatcagcaagcacgaggactggagcaagttcggctttaagttcagcgatacagcctcctacaacgacatctccgagttctatcgcgaggtggagaagcagggctacaagctgacctatacagacatcgatgagacatacatcaatgatctgatcgagcggaacgagctgtacctgttccagatctataataaggactttagcatgtactccaagggcaagctgaacctgcacacactgtatttcatgatgctgtttgatcagcgcaatatcgacgacgtggtgtataagctgaacggagaggcagaggtgttctataggccagcctccatctctgaggacgagctgatcatccacaaggccggcgaggagatcaagaacaagaatcctaaccgggccagaaccaaggagacaagcaccttcagctacgacatcgtgaaggataagcggtatagcaaggataagtttaccctgcacatccccatcacaatgaacttcggcgtggatgaggtgaagcggttcaacgacgccgtgaacagcgccatccggatcgatgagaatgtgaacgtgatcggcatcgaccggggcgagagaaatctgctgtacgtggtggtcatcgactctaagggcaacatcctggagcagatctccctgaactctatcatcaataaggagtacgacatcgagacagattatcacgcactgctggatgagagggagggcggcagagataaggcccggaaggactggaacaccgtggagaatatcagggacctgaaggccggctacctgagccaggtggtgaacgtggtggccaagctggtgctgaagtataatgccatcatctgcctggaggacctgaactttggcttcaagaggggccgccagaaggtggagaagcaggtgtaccagaagttcgagaagatgctgatcgataagctgaattacctggtcatcgacaagagccgcgagcagacatcccctaaggagctgggaggcgccctgaacgcactgcagctgacctctaagttcaagagctttaaggagctgggcaagcagtccggcgtgatctactatgtgcctgcctacctgacctctaagatcgatccaaccacaggcttcgccaatctgttttatatgaagtgtgagaacgtggagaagtccaagagattctttgacggctttgatttcatcaggttcaacgccctggagaacgtgttcgagttcggctttgactaccggagcttcacccagagggcctgcggcatcaattccaagtggaccgtgtgcaccaacggcgagcgcatcatcaagtatcggaatccagataagaacaatatgttcgacgagaaggtggtggtggtgaccgatgagatgaagaacctgtttgagcagtacaagatcccctatgaggatggcagaaatgtgaaggacatgatcatcagcaacgaggaggccgagttctaccggagactgtataggctgctgcagcagaccctgcagatgagaaacagcacctccgacggcacaagggattacatcatctcccctgtgaagaataagagagaggcctacttcaacagcgagctgtccgacggctctgtgccaaaggacgccgatgccaacggcgcctacaatatcgccagaaagggcctgtgggtgctggagcagatcaggcagaagagcgagggcgagaagatcaatctggccatgaccaacgccgagtggctggagtatgcccagacacacctgctgaaaaggccggcggccacgaaaaaggccggccaggcaaaaaagaaaaagggatcctacccatacgatgttccagattacgcttatccctacgacgtgcctgattatgcatacccatatgatgtccccgactatgcctaagaattc

SEQ ID NO: 1263 - protein, 1206 aa, Artificial Sequence; identical to SEQ ID NO: 113
  Description of Artificial Sequence: Synthetic polypeptide

SEQ ID NO: 1264 - DNA, 3864 bp, Artificial Sequence
  Description of Artificial Sequence: Synthetic polynucleotide
ggtaccatgaacaattacgacgagttcaccaagctgtatcctatccagaaaaccatccggtttgagctgaagccacagggcagaaccatggagcacctggagacattcaacttctttgaggaggaccgggatagagccgagaagtataagatcctgaaggaggccatcgacgagtaccacaagaagtttatcgatgagcacctgaccaatatgtccctggattggaactctctgaagcagatcagcgagaagtactataagagcagggaggagaaggacaagaaggtgttcctgtccgagcagaagaggatgcgccaggagatcgtgtctgagtttaagaaggacgatcgcttcaaggacctgttttccaagaagctgttctctgagctgctgaaggaggagatctacaagaagggcaaccaccaggagatcgacgccctgaagagcttcgataagttttccggctatttcatcggcctgcacgagaataggaagaacatgtactccgacggcgatgagatcaccgccatctccaatcgcatcgtgaatgagaacttccccaagtttctggataacctgcagaagtaccaggaggccaggaagaagtatcctgagtggatcatcaaggccgagagcgccctggtggcccacaatatcaagatggacgaggtgttctccctggagtactttaataaggtgctgaaccaggagggcatccagcggtacaacctggccctgggcggctatgtgaccaagagcggcgagaagatgatgggcctgaatgatgccctgaacctggcccaccagtccgagaagagctccaagggcagaatccacatgacccccctgttcaagcagatcctgtccgagaaggagtccttctcttacatccccgacgtgtttacagaggattctcagctgctgcctagcatcggcggcttctttgcccagatcgagaatgacaaggatggcaacatcttcgaccgggccctggagctgatctctagctacgccgagtatgataccgagcggatctatatcagacaggccgacatcaatagagtgtccaacgtgatctttggagagtggggcaccctgggaggcctgatgagggagtacaaggccgactctatcaatgatatcaacctggagcgcacatgcaagaaggtggacaagtggctggattctaaggagtttgccctgagcgatgtgctggaggccatcaagaggaccggcaacaatgacgccttcaacgagtatatctccaagatgcggacagccagagagaagatcgatgccgcccgcaaggagatgaagttcatcagcgagaagatctccggcgatgaggagtctatccacatcatcaagaccctgctggacagcgtgcagcagttcctgcacttctttaatctgtttaaggcaaggcaggacatcccactggatggagccttctacgccgagtttgacgaggtgcacagcaagctgtttgccatcgtgcccctgtataacaaggtgcggaactatctgaccaagaacaatctgaacacaaagaagatcaagctgaatttcaagaaccctacactggccaatggctgggaccagaacaaggtgtacgattatgcctccctgatctttctgcgggacggcaattactatctgggcatcatcaatcctaagagaaagaagaacatcaagttcgagcagggctctggcaacggccccttctaccggaagatggtgtataagcagatccccggccctaataagaacctgccaagagtgttcctgacctccacaaagggcaagaaggagtataagccctctaaggagatcatcgagggctacgaggccgacaagcacatcaggggcgataagttcgacctggatttttgtcacaagctgatcgatttctttaaggagtccatcgagaagcacaaggactggtctaagttcaacttctacttcagcccaaccgagagctatggcgacatctctgagttctacctggatgtggagaagcagggctatcgcatgcactttgagaatatcagcgccgagacaatcgacgagtatgtggagaagggcgatctgtttctgttccagatctacaacaaggattttgtgaaggccgccaccggcaagaaggacatgcacacaatctactggaatgccgccttcagccccgagaacctgcaggacgtggtggtgaagctgaacggcgaggccgagctgttttatagggacaagtccgatatcaaggagatcgtgcaccgcgagggcgagatcctggtgaataggacctacaacggccgcacaccagtgcccgacaagatccacaagaagctgaccgattatcacaatggccggacaaaggacctgggcgaggccaaggagtacctggataaggtgagatacttcaaggcccactatgacatcaccaaggatcggagatacctgaacgacaagatctatttccacgtgcctctgaccctgaacttcaaggccaacggcaagaagaatctgaacaagatggtcatcgagaagttcctgtccgatgagaaggcccacatcatcggcatcgacaggggcgagcgcaatctgctgtactattccatcatcgacaggtctggcaagatcatcgatcagcagagcctgaatgtgatcgacggctttgattatcgggagaagctgaaccagagagagatcgagatgaaggatgcccgccagtcttggaacgccatcggcaagatcaaggacctgaaggagggctacctgagcaaggccgtgcacgagatcaccaagatggccatccagtataatgccatcgtggtcatggaggagctgaactacggcttcaagcggggccggttcaaggtggagaagcagatctatcagaagttcgagaatatgctgatcgataagatgaactacctggtgtttaaggacgcacctgatgagtccccaggaggcgtgctgaatgcctaccagctgacaaacccactggagtctttcgccaagctgggcaagcagaccggcatcctgttttacgtgccagccgcctatacatccaagatcgaccccaccacaggcttcgtgaatctgtttaacacctcctctaagacaaacgcccaggagcggaaggagttcctgcagaagtttgagagcatctcctattctgccaaggatggcggcatctttgccttcgcctttgactacagaaagttcggcaccagcaagacagatcacaagaacgtgtggaccgcctatacaaacggcgagaggatgcgctacatcaaggagaagaagcggaatgagctgtttgacccttctaaggagatcaaggaggccctgaccagctccggcatcaagtacgatggcggccagaacatcctgccagacatcctgaggagcaacaataacggcctgatctacacaatgtattctagcttcatcgccgccatccagatgcgcgtgtacgacggcaaggaggattatatcatcagccccatcaagaactccaagggcgagttctttaggaccgaccccaagaggcgcgagctgcctatcgacgccgatgccaatggcgcctacaacatcgccctgaggggagagctgacaatgagggcaatcgcagagaagttcgaccctgatagcgagaagatggccaagctggagctgaagcacaaggattggttcgagtttatgcagaccagaggcgacaaaaggccggcggccacgaaaaaggccggccaggcaaaaaagaaaaagggatcctacccatacgatgttccagattacgcttatccctacgacgtgcctgattatgcatacccatatgatgtccccgactatgcctaagaattc

SEQ ID NO: 1265 - protein, 1238 aa, Artificial Sequence; identical to SEQ ID NO: 104
  Description of Artificial Sequence: Synthetic polypeptide

SEQ ID NO: 1266 - DNA, 3996 bp, Artificial Sequence
  Description of Artificial Sequence: Synthetic polynucleotide
ggtaccatgaacggcaataggtccatcgtgtaccgcgagttcgtgggcgtgatccccgtggccaagaccctgaggaatgagctgcgccctgtgggccacacacaggagcacatcatccagaacggcctgatccaggaggacgagctgcggcaggagaagagcaccgagctgaagaacatcatggacgattactatagagagtacatcgataagtctctgagcggcgtgaccgacctggacttcaccctgctgttcgagctgatgaacctggtgcagagctccccctccaaggacaataagaaggccctggagaaggagcagtctaagatgagggagcagatctgcacccacctgcagtccgactctaactacaagaatatctttaacgccaagctgctgaaggagatcctgcctgatttcatcaagaactacaatcagtatgacgtgaaggataaggccggcaagctggagacactggccctgtttaatggcttcagcacatactttaccgacttctttgagaagaggaagaacgtgttcaccaaggaggccgtgagcacatccatcgcctaccgcatcgtgcacgagaactccctgatcttcctggccaatatgacctcttataagaagatcagcgagaaggccctggatgagatcgaagtgatcgagaagaacaatcaggacaagatgggcgattgggagctgaatcagatctttaaccctgacttctacaatatggtgctgatccagtccggcatcgacttctacaacgagatctgcggcgtggtgaatgcccacatgaacctgtactgtcagcagaccaagaacaattataacctgttcaagatgcggaagctgcacaagcagatcctggcctacaccagcaccagcttcgaggtgcccaagatgttcgaggacgatatgagcgtgtataacgccgtgaacgccttcatcgacgagacagagaagggcaacatcatcggcaagctgaaggatatcgtgaataagtacgacgagctggatgagaagagaatctatatcagcaaggacttttacgagacactgagctgcttcatgtccggcaactggaatctgatcacaggctgcgtggagaacttctacgatgagaacatccacgccaagggcaagtccaaggaggagaaggtgaagaaggccgtgaaggaggacaagtacaagtctatcaatgacgtgaacgatctggtggagaagtatatcgatgagaaggagaggaatgagttcaagaacagcaatgccaagcagtacatccgcgagatctccaacatcatcaccgacacagagacagcccacctggagtatgacgatcacatctctctgatcgagagcgaggagaaggccgacgagatgaagaagcggctggatatgtatatgaacatgtaccactgggccaaggcctttatcgtggacgaggtgctggacagagatgagatgttctacagcgatatcgacgatatctataatatcctggagaacatcgtgccactgtataatcgggtgagaaactacgtgacccagaagccctacaactctaagaagatcaagctgaatttccagagccctacactggccaatggctggtcccagtctaaggagttcgacaacaatgccatcatcctgatcagagataacaagtactatctggccatcttcaatgccaagaacaagccagacaagaagatcatccagggcaactccgataagaagaacgacaacgattacaagaagatggtgtataacctgctgccaggcgccaacaagatgctgcccaaggtgtttctgtctaagaagggcatcgagacattcaagccctccgactatatcatctctggctacaacgcccacaagcacatcaagacaagcgagaattttgatatctccttctgtcgggacctgatcgattacttcaagaacagcatcgagaagcacgccgagtggagaaagtatgagttcaagttttccgccaccgacagctactccgatatctctgagttctatcgggaggtggagatgcagggctacagaatcgactggacatatatcagcgaggccgacatcaacaagctggatgaggagggcaagatctatctgtttcagatctacaataaggatttcgccgagaacagcaccggcaaggagaatctgcacacaatgtactttaagaacatcttctccgaggagaatctgaaggacatcatcatcaagctgaacggccaggccgagctgttttatcggagagcctctgtgaagaatcccgtgaagcacaagaaggatagcgtgctggtgaacaagacctacaagaatcagctggacaacggcgacgtggtgagaatccccatccctgacgatatctataacgagatctacaagatgtataatggctacatcaaggagtccgacctgtctgaggccgccaaggagtacctggataaggtggaggtgaggaccgcccagaaggacatcgtgaaggattaccgctatacagtggacaagtacttcatccacacacctatcaccatcaactataaggtgaccgcccgcaacaatgtgaatgatatggtggtgaagtacatcgcccagaacgacgatatccacgtgatcggcatcgaccggggcgagagaaacctgatctacatctccgtgatcgattctcacggcaacatcgtgaagcagaaatcctacaacatcctgaacaactacgactacaagaagaagctggtggagaaggagaaaacccgggagtacgccagaaagaactggaagagcatcggcaatatcaaggagctgaaggagggctatatctccggcgtggtgcacgagatcgccatgctgatcgtggagtacaacgccatcatcgccatggaggacctgaattatggctttaagaggggccgcttcaaggtggagcggcaggtgtaccagaagtttgagagcatgctgatcaataagctgaactatttcgccagcaaggagaagtccgtggacgagccaggaggcctgctgaagggctatcagctgacctacgtgcccgataatatcaagaacctgggcaagcagtgcggcgtgatcttttacgtgcctgccgccttcaccagcaagatcgacccatccacaggctttatctctgccttcaactttaagtctatcagcacaaatgcctctcggaagcagttctttatgcagtttgacgagatcagatactgtgccgagaaggatatgttcagctttggcttcgactacaacaacttcgatacctacaacatcacaatgggcaagacacagtggaccgtgtatacaaacggcgagagactgcagtctgagttcaacaatgccaggcgcaccggcaagacaaagagcatcaatctgacagagacaatcaagctgctgctggaggacaatgagatcaactacgccgacggccacgatatcaggatcgatatggagaagatggacgaggataagaagagcgagttctttgcccagctgctgagcctgtataagctgaccgtgcagatgcgcaattcctatacagaggccgaggagcaggagaacggcatctcttacgacaagatcatcagccctgtgatcaatgatgagggcgagttctttgactccgataactataaggagtctgacgataaggagtgcaagatgccaaaggacgccgatgccaacggcgcctactgtatcgccctgaagggcctgtatgaggtgctgaagatcaagagcgagtggaccgaggacggctttgataggaattgcctgaagctgccacacgcagagtggctggacttcatccagaacaagcggtacgagaaaaggccggcggccacgaaaaaggccggccaggcaaaaaagaaaaagggatcctacccatacgatgttccagattacgcttatccctacgacgtgcctgattatgcatacccatatgatgtccccgactatgcctaagaattc

SEQ ID NO: 1267 - protein, 1282 aa, Artificial Sequence; identical to SEQ ID NO: 85
  Description of Artificial Sequence: Synthetic polypeptide

SEQ ID NO: 1268 - DNA, 4269 bp, Artificial Sequence
  Description of Artificial Sequence: Synthetic polynucleotide
ggtaccatgctgttccaggactttacccacctgtatccactgtccaagacagtgagatttgagctgaagcccatcgataggaccctggagcacatccacgccaagaacttcctgtctcaggacgagacaatggccgatatgcaccagaaggtgaaagtgatcctggacgattaccaccgcgacttcatcgccgatatgatgggcgaggtgaagctgaccaagctggccgagttctatgacgtgtacctgaagtttcggaagaacccaaaggacgatgagctgcagaagcagctgaaggatctgcaggccgtgctgagaaaggagatcgtgaagcccatcggcaatggcggcaagtataaggccggctacgacaggctgttcggcgccaagctgtttaaggacggcaaggagctgggcgatctggccaagttcgtgatcgcacaggagggagagagctccccaaagctggcccacctggcccacttcgagaagttttccacctatttcacaggctttcacgataaccggaagaatatgtattctgacgaggataagcacaccgccatcgcctaccgcctgatccacgagaacctgccccggtttatcgacaatctgcagatcctgaccacaatcaagcagaagcactctgccctgtacgatcagatcatcaacgagctgaccgccagcggcctggacgtgtctctggccagccacctggatggctatcacaagctgctgacacaggagggcatcaccgcctacaatacactgctgggaggaatctccggagaggcaggctctcctaagatccagggcatcaacgagctgatcaattctcaccacaaccagcactgccacaagagcgagagaatcgccaagctgaggccactgcacaagcagatcctgtccgacggcatgagcgtgtccttcctgccctctaagtttgccgacgatagcgagatgtgccaggccgtgaacgagttctatcgccactacgccgacgtgttcgccaaggtgcagagcctgttcgacggctttgacgatcaccagaaggatggcatctacgtggagcacaagaacctgaatgagctgtccaagcaggccttcggcgactttgcactgctgggacgcgtgctggacggatactatgtggatgtggtgaatccagagttcaacgagcggtttgccaaggccaagaccgacaatgccaaggccaagctgacaaaggagaaggataagttcatcaagggcgtgcactccctggcctctctggagcaggccatcgagcactataccgcaaggcacgacgatgagagcgtgcaggcaggcaagctgggacagtacttcaagcacggcctggccggagtggacaaccccatccagaagatccacaacaatcacagcaccatcaagggctttctggagagggagcgccctgcaggagagagagccctgccaaagatcaagtccggcaagaatcctgagatgacacagctgaggcagctgaaggagctgctggataacgccctgaatgtggcccacttcgccaagctgctgaccacaaagaccacactggacaatcaggatggcaacttctatggcgagtttggcgtgctgtacgacgagctggccaagatccccaccctgtataacaaggtgagagattacctgagccagaagcctttctccaccgagaagtacaagctgaactttggcaatccaacactgctgaatggctgggacctgaacaaggagaaggataatttcggcgtgatcctgcagaaggacggctgctactatctggccctgctggacaaggcccacaagaaggtgtttgataacgcccctaatacaggcaagagcatctatcagaagatgatctataagtacctggaggtgaggaagcagttccccaaggtgttcttttccaaggaggccatcgccatcaactaccacccttctaaggagctggtggagatcaaggacaagggccggcagagatccgacgatgagcgcctgaagctgtatcggtttatcctggagtgtctgaagatccaccctaagtacgataagaagttcgagggcgccatcggcgacatccagctgtttaagaaggataagaagggcagagaggtgccaatcagcgagaaggacctgttcgataagatcaacggcatcttttctagcaagcctaagctggagatggaggacttctttatcggcgagttcaagaggtataacccaagccaggacctggtggatcagtataatatctacaagaagatcgactccaacgataatcgcaagaaggagaatttctacaacaatcaccccaagtttaagaaggatctggtgcggtactattacgagtctatgtgcaagcacgaggagtgggaggagagcttcgagttttccaagaagctgcaggacatcggctgttacgtggatgtgaacgagctgtttaccgagatcgagacacggagactgaattataagatctccttctgcaacatcaatgccgactacatcgatgagctggtggagcagggccagctgtatctgttccagatctacaacaaggacttttccccaaaggcccacggcaagcccaatctgcacaccctgtacttcaaggccctgttttctgaggacaacctggccgatcctatctataagctgaatggcgaggcccagatcttctacagaaaggcctccctggacatgaacgagacaacaatccacagggccggcgaggtgctggagaacaagaatcccgataatcctaagaagagacagttcgtgtacgacatcatcaaggataagaggtacacacaggacaagttcatgctgcacgtgccaatcaccatgaactttggcgtgcagggcatgacaatcaaggagttcaataagaaggtgaaccagtctatccagcagtatgacgaggtgaacgtgatcggcatcgatcggggcgagagacacctgctgtacctgaccgtgatcaatagcaagggcgagatcctggagcagtgttccctgaacgacatcaccacagcctctgccaatggcacacagatgaccacaccttaccacaagatcctggataagagggagatcgagcgcctgaacgcccgggtgggatggggcgagatcgagacaatcaaggagctgaagtctggctatctgagccacgtggtgcaccagatcagccagctgatgctgaagtacaacgccatcgtggtgctggaggacctgaatttcggctttaagaggggccgctttaaggtggagaagcagatctatcagaacttcgagaatgccctgatcaagaagctgaaccacctggtgctgaaggacaaggccgacgatgagatcggctcttacaagaatgccctgcagctgaccaacaatttcacagatctgaagagcatcggcaagcagaccggcttcctgttttatgtgcccgcctggaacacctctaagatcgaccctgagacaggctttgtggatctgctgaagccaagatacgagaacatcgcccagagccaggccttctttggcaagttcgacaagatctgctataatgccgacaaggattacttcgagtttcacatcgactacgccaagtttaccgataaggccaagaatagccgccagatctggacaatctgttcccacggcgacaagcggtacgtgtacgataagacagccaaccagaataagggcgccgccaagggcatcaacgtgaatgatgagctgaagtccctgttcgcccgccaccacatcaacgagaagcagcccaacctggtcatggacatctgccagaacaatgataaggagtttcacaagtctctgatgtacctgctgaaaaccctgctggccctgcggtacagcaacgcctcctctgacgaggatttcatcctgtcccccgtggcaaacgacgagggcgtgttctttaatagcgccctggccgacgatacacagcctcagaatgccgatgccaacggcgcctaccacatcgccctgaagggcctgtggctgctgaatgagctgaagaactccgacgatctgaacaaggtgaagctggccatcgacaatcagacctggctgaatttcgcccagaacaggaaaaggccggcggccacgaaaaaggccggccaggcaaaaaagaaaaagggatcctacccatacgatgttccagattacgcttatccctacgacgtgcctgattatgcatacccatatgatgtccccgactatgcctaagaattc

SEQ ID NO: 1269 - protein, 1373 aa, Artificial Sequence; identical to SEQ ID NO: 70
  Description of Artificial Sequence: Synthetic polypeptide

SEQ ID NO: 1270 - DNA, 3939 bp, Artificial Sequence
  Description of Artificial Sequence: Synthetic polynucleotide
ggtaccatggaggactattccggctttgtgaacatctactctatccagaaaaccctgaggttcgagctgaagccagtgggcaagacactggagcacatcgagaagaagggcttcctgaagaaggacaagatccgggccgaggattacaaggccgtgaagaagatcatcgataagtaccacagagcctatatcgaggaggtgtttgattccgtgctgcaccagaagaagaagaaggacaagacccgcttttctacacagttcatcaaggagatcaaggagttcagcgagctgtactataagaccgagaagaacatccccgacaaggagaggctggaggccctgagcgagaagctgcgcaagatgctggtgggcgcctttaagggcgagttctccgaggaggtggccgagaagtataagaacctgttttctaaggagctgatcaggaatgagatcgagaagttctgcgagacagacgaggagcgcaagcaggtgtctaacttcaagagcttcaccacatactttaccggcttccactccaacaggcagaatatctattccgacgagaagaagtctacagccatcggctaccgcatcatccaccagaacctgcctaagttcctggataatctgaagatcatcgagtccatccagcggcggttcaaggacttcccatggtctgatctgaagaagaacctgaagaagatcgataagaatatcaagctgaccgagtacttcagcatcgacggcttcgtgaacgtgctgaatcagaagggcatcgatgcctacaacacaatcctgggcggcaagtccgaggagtctggcgagaagatccagggcctgaacgagtacatcaatctgtatcggcagaagaacaatatcgacagaaagaacctgcccaatgtgaagatcctgtttaagcagatcctgggcgatagggagacaaagagctttatccctgaggccttcccagacgatcagtccgtgctgaactctatcacagagttcgccaagtacctgaagctggataagaagaagaagagcatcatcgccgagctgaagaagtttctgagctccttcaatcgctacgagctggacggcatctatctggccaacgataatagcctggcctctatcagcaccttcctgtttgacgattggtcctttatcaagaagtccgtgtctttcaagtatgacgagtccgtgggcgaccccaagaagaagatcaagtctcccctgaagtacgagaaggagaaggagaagtggctgaagcagaagtactatacaatctctttcctgaacgatgccatcgagagctattccaagtctcaggacgagaagagggtgaagatccgcctggaggcctactttgccgagttcaagagcaaggacgatgccaagaagcagttcgacctgctggagaggatcgaggaggcctatgccatcgtggagcctctgctgggagcagagtacccaagggaccgcaacctgaaggccgataagaaggaagtgggcaagatcaaggacttcctggatagcatcaagtccctgcagttctttctgaagcctctgctgtccgccgagatctttgacgagaaggatctgggcttctacaatcagctggagggctactatgaggagatcgattctatcggccacctgtataacaaggtgcggaattatctgaccggcaagatctacagcaaggagaagtttaagctgaacttcgagaacagcaccctgctgaagggctgggacgagaaccgggaggtggccaatctgtgcgtgatcttcagagaggaccagaagtactatctgggcgtgatggataaggagaacaataccatcctgtccgacatccccaaggtgaagcctaacgagctgttttacgagaagatggtgtataagctgatccccacacctcacatgcagctgccccggatcatcttctctagcgacaacctgtctatctataatcctagcaagtccatcctgaagatcagagaggccaagagctttaaggagggcaagaacttcaagctgaaggactgtcacaagtttatcgatttctacaaggagtctatcagcaagaatgaggactggagcagattcgacttcaagttcagcaagaccagcagctacgagaacatcagcgagttttaccgggaggtggagagacagggctataacctggacttcaagaaggtgtctaagttctacatcgacagcctggtggaggatggcaagctgtacctgttccagatctataacaaggacttttctatcttcagcaagggcaagcccaatctgcacaccatctattttcggtccctgttctctaaggagaacctgaaggacgtgtgcctgaagctgaatggcgaggccgagatgttctttcggaagaagtccatcaactacgatgagaagaagaagcgggagggccaccaccccgagctgtttgagaagctgaagtatcctatcctgaaggacaagagatacagcgaggataagtttcagttccacctgcccatcagcctgaacttcaagtccaaggagcggctgaactttaatctgaaagtgaatgagttcctgaagagaaacaaggacatcaatatcatcggcatcgatcggggcgagagaaacctgctgtacctggtcatgatcaatcagaagggcgagatcctgaagcagaccctgctggacagcatgcagtccggcaagggccggcctgagatcaactacaaggagaagctgcaggagaaggagatcgagagggataaggcccgcaagagctggggcacagtggagaatatcaaggagctgaaggagggctatctgtctatcgtgatccaccagatcagcaagctgatggtggagaacaatgccatcgtggtgctggaggacctgaacatcggctttaagcggggcagacagaaggtggagcggcaggtgtaccagaagttcgagaagatgctgatcgataagctgaactttctggtgttcaaggagaataagccaaccgagccaggaggcgtgctgaaggcctatcagctgacagacgagtttcagtctttcgagaagctgagcaagcagaccggctttctgttctacgtgccaagctggaacacctccaagatcgaccccagaacaggctttatcgatttcctgcaccctgcctacgagaatatcgagaaggccaagcagtggatcaacaagtttgattccatcaggttcaattctaagatggactggtttgagttcaccgccgatacacgcaagttttccgagaacctgatgctgggcaagaatcgggtgtgggtcatctgcaccacaaatgtggagcggtacttcaccagcaagaccgccaacagctccatccagtacaatagcatccagatcaccgagaagctgaaggagctgtttgtggacatccctttcagcaacggccaggatctgaagccagagatcctgaggaagaatgacgccgtgttctttaagagcctgctgttttacatcaagaccacactgtccctgcgccagaacaatggcaagaagggcgaggaggagaaggacttcatcctgagcccagtggtggattccaagggccggttctttaactctctggaggccagcgacgatgagcccaaggacgccgatgccaatggcgcctaccacatcgccctgaagggcctgatgaacctgctggtgctgaatgagacaaaggaggagaacctgagcagaccaaagtggaagatcaagaataaggactggctggagttcgtgtgggagaggaaccgcaaaaggccggcggccacgaaaaaggccggccaggcaaaaaagaaaaagggatcctacccatacgatgttccagattacgcttatccctacgacgtgcctgattatgcatacccatatgatgtccccgactatgcctaagaattc

SEQ ID NO: 1271 - protein, 1263 aa, Artificial Sequence; identical to SEQ ID NO: 89
  Description of Artificial Sequence: Synthetic polypeptide

SEQ ID NO: 1272 - DNA, 3834 bp, Artificial Sequence
  Description of Artificial Sequence: Synthetic polynucleotide
ggtaccatgagcaagctggagaagtttacaaactgctactccctgtctaagaccctgaggttcaaggccatccctgtgggcaagacccaggagaacatcgacaataagcggctgctggtggaggacgagaagagagccgaggattataagggcgtgaagaagctgctggatcgctactatctgtcttttatcaacgacgtgctgcacagcatcaagctgaagaatctgaacaattacatcagcctgttccggaagaaaaccagaaccgagaaggagaataaggagctggagaacctggagatcaatctgcggaaggagatcgccaaggccttcaagggcaacgagggctacaagtccctgtttaagaaggatatcatcgagacaatcctgccagagttcctggacgataaggacgagatcgccctggtgaacagcttcaatggctttaccacagccttcaccggcttctttgataacagagagaatatgttttccgaggaggccaagagcacatccatcgccttcaggtgtatcaacgagaatctgacccgctacatctctaatatggacatcttcgagaaggtggacgccatctttgataagcacgaggtgcaggagatcaaggagaagatcctgaacagcgactatgatgtggaggatttctttgagggcgagttctttaactttgtgctgacacaggagggcatcgacgtgtataacgccatcatcggcggcttcgtgaccgagagcggcgagaagatcaagggcctgaacgagtacatcaacctgtataatcagaaaaccaagcagaagctgcctaagtttaagccactgtataagcaggtgctgagcgatcgggagtctctgagcttctacggcgagggctatacatccgatgaggaggtgctggaggtgtttagaaacaccctgaacaagaacagcgagatcttcagctccatcaagaagctggagaagctgttcaagaattttgacgagtactctagcgccggcatctttgtgaagaacggccccgccatcagcacaatctccaaggatatcttcggcgagtggaacgtgatccgggacaagtggaatgccgagtatgacgatatccacctgaagaagaaggccgtggtgaccgagaagtacgaggacgatcggagaaagtccttcaagaagatcggctccttttctctggagcagctgcaggagtacgccgacgccgatctgtctgtggtggagaagctgaaggagatcatcatccagaaggtggatgagatctacaaggtgtatggctcctctgagaagctgttcgacgccgattttgtgctggagaagagcctgaagaagaacgacgccgtggtggccatcatgaaggacctgctggattctgtgaagagcttcgagaattacatcaaggccttctttggcgagggcaaggagacaaacagggacgagtccttctatggcgattttgtgctggcctacgacatcctgctgaaggtggaccacatctacgatgccatccgcaattatgtgacccagaagccctactctaaggataagttcaagctgtattttcagaaccctcagttcatgggcggctgggacaaggataaggagacagactatcgggccaccatcctgagatacggctccaagtactatctggccatcatggataagaagtacgccaagtgcctgcagaagatcgacaaggacgatgtgaacggcaattacgagaagatcaactataagctgctgcccggccctaataagatgctgccaaaggtgttcttttctaagaagtggatggcctactataaccccagcgaggacatccagaagatctacaagaatggcacattcaagaagggcgatatgtttaacctgaatgactgtcacaagctgatcgacttctttaaggatagcatctcccggtatccaaagtggtccaatgcctacgatttcaacttttctgagacagagaagtataaggacatcgccggcttttacagagaggtggaggagcagggctataaggtgagcttcgagtctgccagcaagaaggaggtggataagctggtggaggagggcaagctgtatatgttccagatctataacaaggacttttccgataagtctcacggcacacccaatctgcacaccatgtacttcaagctgctgtttgacgagaacaatcacggacagatcaggctgagcggaggagcagagctgttcatgaggcgcgcctccctgaagaaggaggagctggtggtgcacccagccaactcccctatcgccaacaagaatccagataatcccaagaaaaccacaaccctgtcctacgacgtgtataaggataagaggttttctgaggaccagtacgagctgcacatcccaatcgccatcaataagtgccccaagaacatcttcaagatcaatacagaggtgcgcgtgctgctgaagcacgacgataacccctatgtgatcggcatcgataggggcgagcgcaatctgctgtatatcgtggtggtggacggcaagggcaacatcgtggagcagtattccctgaacgagatcatcaacaacttcaacggcatcaggatcaagacagattaccactctctgctggacaagaaggagaaggagaggttcgaggcccgccagaactggacctccatcgagaatatcaaggagctgaaggccggctatatctctcaggtggtgcacaagatctgcgagctggtggagaagtacgatgccgtgatcgccctggaggacctgaactctggctttaagaatagccgcgtgaaggtggagaagcaggtgtatcagaagttcgagaagatgctgatcgataagctgaactacatggtggacaagaagtctaatccttgtgcaacaggcggcgccctgaagggctatcagatcaccaataagttcgagagctttaagtccatgtctacccagaacggcttcatcttttacatccctgcctggctgacatccaagatcgatccatctaccggctttgtgaacctgctgaaaaccaagtataccagcatcgccgattccaagaagttcatcagctcctttgacaggatcatgtacgtgcccgaggaggatctgttcgagtttgccctggactataagaacttctctcgcacagacgccgattacatcaagaagtggaagctgtactcctacggcaaccggatcagaatcttccggaatcctaagaagaacaacgtgttcgactgggaggaggtgtgcctgaccagcgcctataaggagctgttcaacaagtacggcatcaattatcagcagggcgatatcagagccctgctgtgcgagcagtccgacaaggccttctactctagctttatggccctgatgagcctgatgctgcagatgcggaacagcatcacaggccgcaccgacgtggattttctgatcagccctgtgaagaactccgacggcatcttctacgatagccggaactatgaggcccaggagaatgccatcctgccaaagaacgccgacgccaatggcgcctataacatcgccagaaaggtgctgtgggccatcggccagttcaagaaggccgaggacgagaagctggataaggtgaagatcgccatctctaacaaggagtggctggagtacgcccagaccagcgtgaagcacaaaaggccggcggccacgaaaaaggccggccaggcaaaaaagaaaaagggatcctacccatacgatgttccagattacgcttatccctacgacgtgcctgattatgcatacccatatgatgtccccgactatgcctaagaattc

SEQ ID NO: 1273 - protein, 1228 aa, Artificial Sequence; identical to SEQ ID NO: 109
  Description of Artificial Sequence: Synthetic polypeptide

SEQ ID NO: 1274 - DNA, 3930 bp, Artificial Sequence
  Description of Artificial Sequence: Synthetic polynucleotide
ggtaccatggacagcctgaaggatttcaccaacctgtaccccgtgtccaagacactgcggtttgagctgaagcctgtgggcaagaccctggagaatatcgagaaggccggcatcctgaaggaggatgagcacagagccgagagctaccggagagtgaagaagatcatcgatacatatcacaaggtgttcatcgacagctccctggagaacatggccaagatgggcatcgagaatgagatcaaggccatgctgcagtccttttgcgagctgtataagaaggaccacaggaccgagggagaggacaaggccctggataagatcagggccgtgctgaggggcctgatcgtgggagccttcaccggcgtgtgcggccggcgggagaacacagtgcagaatgagaagtatgagagcctgtttaaggagaagctgatcaaggagatcctgccagatttcgtgctgtctacagaggccgagtccctgcccttttctgtggaggaggccaccagaagcctgaaggagttcgactcctttacatcttacttcgccggcttttatgagaaccggaagaatatctactctaccaagccccagagcacagccatcgcctatagactgatccacgagaacctgcctaagttcatcgataatatcctggtgtttcagaagatcaaggagccaatcgccaaggagctggagcacatcagggcagacttcagcgccggcggctacatcaagaaggatgagcgcctggaggacatcttttccctgaactactatatccacgtgctgtctcaggccggcatcgagaagtacaatgccctgatcggcaagatcgtgaccgagggcgatggcgagatgaagggcctgaacgagcacatcaacctgtataatcagcagaggggccgcgaggaccggctgccactgttcagacccctgtataagcagatcctgtctgatagggagcagctgtcctatctgccagagtctttcgagaaggacgaggagctgctgagggccctgaaggagttttacgatcacatcgcagaggacatcctgggaaggacccagcagctgatgacaagcatctccgagtacgatctgtcccggatctatgtgagaaacgatagccagctgaccgacatctccaagaagatgctgggcgattggaatgccatctacatggcccgggagagagcctatgaccacgagcaggcccccaagcgcatcacagccaagtacgagagggaccgcatcaaggccctgaagggcgaggagtctatcagcctggccaacctgaacagctgcatcgccttcctggacaacgtgagggattgtcgcgtggacacctatctgtctacactgggacagaaggagggacctcacggcctgagcaacctggtggagaacgtgttcgcctcctaccacgaggccgagcagctgctgtcttttccctatcctgaggagaacaatctgatccaggacaaggataacgtggtgctgatcaagaacctgctggataatatcagcgacctgcagaggttcctgaagccactgtggggcatgggcgatgagcccgacaaggatgagaggttttacggcgagtacaattatatcaggggcgccctggaccaggtcatccctctgtataacaaggtgcggaattatctgacccgcaagccatactccacacgcaaggtgaagctgaacttcggcaatagccagctgctgtccggctgggataggaacaaggagaaggacaattcttgcgtgatcctgcgcaagggccagaacttctacctggccatcatgaacaatcggcacaagcggagcttcgagaataagatgctgcccgagtataaggagggcgagccttacttcgagaagatggattataagtttctgccagaccccaacaagatgctgcccaaggtgttcctgtctaagaagggcatcgagatctacaagcctagcccaaagctgctggagcagtatggccacggcacccacaagaagggcgataccttcagcatggacgatctgcacgagctgatcgacttctttaagcactccatcgaggcccacgaggattggaagcagttcggctttaagttcagcgacaccgccacatacgagaacgtgagcagcttctaccgggaggtggaggaccagggctacaagctgtcttttagaaaggtgtccgagtcttacgtgtatagcctgatcgatcagggcaagctgtacctgttccagatctataacaaggactttagcccttgttccaagggcaccccaaatctgcacacactgtactggcggatgctgttcgatgagagaaacctggccgacgtgatctataagctggatggcaaggccgagatcttctttcgggagaagtccctgaagaatgaccacccaacccaccctgcaggcaagcccatcaagaagaagagccggcagaagaagggcgaggagagcctgttcgagtacgatctggtgaaggaccggagatataccatggataagtttcagttccacgtgccaatcacaatgaactttaagtgctctgccggcagcaaggtgaacgacatggtgaatgcccacatcagggaggccaaggacatgcacgtgatcggcatcgataggggcgagcgcaatctgctgtatatctgcgtgatcgacagccgcggcaccatcctggatcagatctccctgaacacaatcaatgacatcgattatcacgatctgctggagtccagggacaaggatcgccagcaggagcacaggaactggcagaccatcgagggcatcaaggagctgaagcagggctacctgtctcaggccgtgcaccgcatcgccgagctgatggtggcctataaggccgtggtggccctggaggacctgaacatgggcttcaagcggggcagacagaaggtggagagcagcgtgtaccagcagtttgagaagcagctgatcgacaagctgaattatctggtggataagaagaagcggcccgaggacatcggaggcctgctgagagcctaccagttcaccgcccctttcaagagctttaaggagatgggcaagcagaacggctttctgttctatatccctgcctggaacacatccaatatcgacccaaccacaggcttcgtgaacctgtttcacgtgcagtacgagaatgtggataaggccaagagcttctttcagaagttcgacagcatctcctacaaccctaagaaggattggtttgagttcgcctttgactataagaacttcaccaagaaggccgagggctctaggagcatgtggattctgtgcacccacggctcccggatcaagaacttcagaaattctcagaagaatggccagtgggatagcgaggagtttgccctgaccgaggccttcaagtccctgtttgtgcggtacgagatcgattataccgccgacctgaaaaccgccatcgtggacgagaagcagaaggatttctttgtggacctgctgaagctgttcaagctgaccgtgcagatgagaaactcctggaaggagaaggacctggattacctgatctctccagtggccggcgccgatggcaggttctttgacacacgcgagggcaataagagcctgcccaaggacgcagatgcaaacggagcctataatatcgccctgaagggcctgtgggcactgaggcagatcagacagacctccgagggcggcaagctgaagctggccatctctaacaaggagtggctgcagtttgtgcaggagagatcctacgagaaggacaaaaggccggcggccacgaaaaaggccggccaggcaaaaaagaaaaagggatcctacccatacgatgttccagattacgcttatccctacgacgtgcctgattatgcatacccatatgatgtccccgactatgcctaagaattc

SEQ ID NO: 1275 - protein, 1260 aa, Artificial Sequence; identical to SEQ ID NO: 92
  Description of Artificial Sequence: Synthetic polypeptide

SEQ ID NO: 1276 - DNA, 4119 bp, Artificial Sequence
  Description of Artificial Sequence: Synthetic polynucleotide
ggtaccatggagaactatcaggagttcaccaacctgtttcagctgaataagacactgagattcgagctgaagcccatcggcaagacctgcgagctgctggaggagggcaagatcttcgccagcggctcctttctggagaaggacaaggtgagggccgataacgtgagctacgtgaagaaggagatcgacaagaagcacaagatctttatcgaggagacactgagctccttctctatcagcaacgatctgctgaagcagtactttgactgctataatgagctgaaggccttcaagaaggactgtaagagcgatgaggaggaggtgaagaaaaccgccctgcgcaacaagtgtacctccatccagagggccatgcgcgaggccatctctcaggcctttctgaagagcccccagaagaagctgctggccatcaagaacctgatcgagaacgtgttcaaggccgacgagaatgtgcagcacttctccgagtttaccagctatttctccggctttgagacaaacagagagaatttctactctgacgaggagaagtccacatctatcgcctataggctggtgcacgataacctgcctatcttcatcaagaacatctacatcttcgagaagctgaaggagcagttcgacgccaagaccctgagcgagatcttcgagaactacaagctgtatgtggccggctctagcctggatgaggtgttctccctggagtactttaacaataccctgacacagaagggcatcgacaactataatgccgtgatcggcaagatcgtgaaggaggataagcaggagatccagggcctgaacgagcacatcaacctgtataatcagaagcacaaggaccggagactgcccttctttatctccctgaagaagcagatcctgtccgatcgggaggccctgtcttggctgcctgacatgttcaagaatgattctgaagtgatcaaggccctgaagggcttctacatcgaggacggctttgagaacaatgtgctgacacctctggccaccctgctgtcctctctggataagtacaacctgaatggcatctttatccgcaacaatgaggccctgagctccctgtcccagaacgtgtatcggaatttttctatcgacgaggccatcgatgccaacgccgagctgcagaccttcaacaattacgagctgatcgccaatgccctgcgcgccaagatcaagaaggagacaaagcagggccggaagtctttcgagaagtacgaggagtatatcgataagaaggtgaaggccatcgacagcctgtccatccaggagatcaacgagctggtggagaattacgtgagcgagtttaactctaatagcggcaacatgccaagaaaggtggaggactacttcagcctgatgaggaagggcgacttcggctccaacgatctgatcgaaaatatcaagaccaagctgagcgccgcagagaagctgctgggcacaaagtaccaggagacagccaaggacatcttcaagaaggatgagaactccaagctgatcaaggagctgctggacgccaccaagcagttccagcactttatcaagccactgctgggcacaggcgaggaggcagatcgggacctggtgttctacggcgattttctgcccctgtatgagaagtttgaggagctgaccctgctgtataacaaggtgcggaatagactgacacagaagccctattccaaggacaagatccgcctgtgcttcaacaagcctaagctgatgacaggctgggtggattccaagaccgagaagtctgacaacggcacacagtacggcggctatctgtttcggaagaagaatgagatcggcgagtacgattattttctgggcatctctagcaaggcccagctgttcagaaagaacgaggccgtgatcggcgactacgagaggctggattactatcagccaaaggccaataccatctacggctctgcctatgagggcgagaacagctacaaggaggacaagaagcggctgaacaaagtgatcatcgcctatatcgagcagatcaagcagacaaacatcaagaagtctatcatcgagtccatctctaagtatcctaatatcagcgacgatgacaaggtgaccccatcctctctgctggagaagatcaagaaggtgtctatcgacagctacaacggcatcctgtccttcaagtcttttcagagcgtgaacaaggaagtgatcgataacctgctgaaaaccatcagccccctgaagaacaaggccgagtttctggacctgatcaataaggattatcagatcttcaccgaggtgcaggccgtgatcgacgagatctgcaagcagaaaaccttcatctactttccaatctccaacgtggagctggagaaggagatgggcgataaggacaagcccctgtgcctgttccagatcagcaataaggatctgtccttcgccaagacctttagcgccaacctgcggaagaagagaggcgccgagaatctgcacacaatgctgtttaaggccctgatggagggcaaccaggataatctggacctgggctctggcgccatcttctacagagccaagagcctggacggcaacaagcccacacaccctgccaatgaggccatcaagtgtaggaacgtggccaataaggataaggtgtccctgttcacctacgacatctataagaacaggcgctacatggagaataagttcctgtttcacctgagcatcgtgcagaactataaggccgccaatgactccgcccagctgaacagctccgccaccgagtatatcagaaaggccgatgacctgcacatcatcggcatcgataggggcgagcgcaatctgctgtactattccgtgatcgatatgaagggcaacatcgtggagcaggactctctgaatatcatcaggaacaatgacctggagacagattaccacgacctgctggataagagggagaaggagcgcaaggccaaccggcagaattgggaggccgtggagggcatcaaggacctgaagaagggctacctgagccaggccgtgcaccagatcgcccagctgatgctgaagtataacgccatcatcgccctggaggatctgggccagatgtttgtgacccgcggccagaagatcgagaaggccgtgtaccagcagttcgagaagagcctggtggataagctgtcctacctggtggacaagaagcggccttataatgagctgggcggcatcctgaaggcctaccagctggcctctagcatcaccaagaacaattctgacaagcagaacggcttcctgttttatgtgccagcctggaatacaagcaagatcgatcccgtgaccggctttacagacctgctgcggcccaaggccatgaccatcaaggaggcccaggacttctttggcgccttcgataacatctcttacaatgacaagggctatttcgagtttgagacaaactacgacaagtttaagatcagaatgaagagcgcccagaccaggtggacaatctgcaccttcggcaatcggatcaagagaaagaaggataagaactactggaattatgaggaggtggagctgaccgaggagttcaagaagctgtttaaggacagcaacatcgattacgagaactgtaatctgaaggaggagatccagaacaaggacaatcgcaagttctttgatgacctgatcaagctgctgcagctgacactgcagatgcggaactccgatgacaagggcaatgattatatcatctctcctgtggccaacgccgagggccagttctttgactcccgcaatggcgataagaagctgccactggatgcagacgcaaacggagcctacaatatcgcccgcaagggcctgtggaacatccggcagatcaagcagaccaagaacgacaagaagctgaatctgagcatctcctctacagagtggctggatttcgtgcgggagaagccttacctgaagaaaaggccggcggccacgaaaaaggccggccaggcaaaaaagaaaaagggatcctacccatacgatgttccagattacgcttatccctacgacgtgcctgattatgcatacccatatgatgtccccgactatgcctaagaattc

SEQ ID NO: 1277 - protein, 1323 aa, Artificial Sequence; identical to SEQ ID NO: 74
  Description of Artificial Sequence: Synthetic polypeptide

SEQ ID NO: 1278 - DNA, 3888 bp, Artificial Sequence
  Description of Artificial Sequence: Synthetic polynucleotide
ggtaccatgaaaacccagcacttctttgaggacttcacaagcctgtactctctgagcaagaccatccggtttgagctgaagccaatcggcaagaccctggagaacatcaagaagaatggcctgatccggagagatgagcagagactggacgattacgagaagctgaagaaagtgatcgacgagtatcacgaggatttcatcgccaacatcctgagctccttttccttctctgaggagatcctgcagtcctacatccagaatctgagcgagtccgaggccagggccaagatcgagaaaaccatgcgcgacacactggccaaggccttctctgaggatgagaggtacaagagcatctttaagaaggagctggtgaagaaggacatccccgtgtggtgccctgcctataagagcctgtgcaagaagttcgataactttaccacatctctggtgcccttccacgagaacaggaagaacctgtataccagcaatgagatcacagcctctatcccttatcgcatcgtgcacgtgaacctgccaaagtttatccagaatatcgaggccctgtgcgagctgcagaagaagatgggcgccgacctgtacctggagatgatggagaacctgcgcaacgtgtggcccagcttcgtgaaaaccccagacgacctgtgcaacctgaaaacctataatcacctgatggtgcagtctagcatcagcgagtacaacaggtttgtgggcggctattccaccgaggacggcacaaagcaccagggcatcaacgagtggatcaatatctacagacagaggaataaggagatgcgcctgcctggcctggtgttcctgcacaagcagatcctggccaaggtggactcctctagcttcatcagcgatacactggagaacgacgatcaggtgttttgcgtgctgagacagttcaggaagctgttttggaataccgtgtcctctaaggaggacgatgccgcctccctgaaggacctgttctgtggcctgtctggctatgaccctgaggccatctacgtgagcgatgcccacctggccacaatctccaagaacatctttgacagatggaattacatctccgatgccatcaggcgcaagaccgaggtgctgatgccacggaagaaggagagcgtggagagatatgccgagaagatctccaagcagatcaagaagagacagtcttacagcctggccgagctggacgatctgctggcccactatagcgaggagtccctgcccgcaggcttctctctgctgagctactttacatctctgggcggccagaagtatctggtgagcgacggcgaagtgatcctgtacgaggagggcagcaacatctgggacgaggtgctgatcgccttcagggatctgcaggtcatcctggacaaggacttcaccgagaagaagctgggcaaggatgaggaggccgtgtctgtgatcaagaaggccctggacagcgccctgcgcctgcggaagttctttgatctgctgtccggcacaggcgcagagatcaggagagacagctccttctatgccctgtataccgaccggatggataagctgaagggcctgctgaagatgtatgataaggtgagaaactacctgaccaagaagccttattccatcgagaagttcaagctgcactttgacaacccatccctgctgtctggctgggataagaataaggagctgaacaatctgtctgtgatcttccggcagaacggctactattacctgggcatcatgacacccaagggcaagaatctgttcaagaccctgcctaagctgggcgccgaggagatgttttatgagaagatggagtacaagcagatcgccgagcctatgctgatgctgccaaaggtgttctttcccaagaaaaccaagccagccttcgccccagaccagagcgtggtggatatctacaacaagaaaaccttcaagacaggccagaagggctttaataagaaggacctgtaccggctgatcgacttctacaaggaggccctgacagtgcacgagtggaagctgtttaacttctccttttctccaaccgagcagtatcggaatatcggcgagttctttgacgaggtgagagagcaggcctacaaggtgtccatggtgaacgtgcccgcctcttatatcgacgaggccgtggagaacggcaagctgtatctgttccagatctacaataaggacttcagcccctactccaagggcatccctaacctgcacacactgtattggaaggccctgttcagcgagcagaatcagagccgggtgtataagctgtgcggaggaggagagctgttttatagaaaggccagcctgcacatgcaggacaccacagtgcaccccaagggcatctctatccacaagaagaacctgaataagaagggcgagacaagcctgttcaactacgacctggtgaaggataagaggtttaccgaggacaagttctttttccacgtgcctatctctatcaactacaagaataagaagatcaccaacgtgaatcagatggtgcgcgattatatcgcccagaacgacgatctgcagatcatcggcatcgaccgcggcgagcggaatctgctgtatatcagccggatcgatacaaggggcaacctgctggagcagttcagcctgaatgtgatcgagtccgacaagggcgatctgagaaccgactatcagaagatcctgggcgatcgcgagcaggagcggctgaggcgccggcaggagtggaagtctatcgagagcatcaaggacctgaaggatggctacatgagccaggtggtgcacaagatctgtaacatggtggtggagcacaaggccatcgtggtgctggagaacctgaatctgagcttcatgaagggcaggaagaaggtggagaagtccgtgtacgagaagtttgagcgcatgctggtggacaagctgaactatctggtggtggataagaagaacctgtccaatgagccaggaggcctgtatgcagcataccagctgaccaatccactgttctcttttgaggagctgcacagatacccccagagcggcatcctgtttttcgtggacccatggaacacctctctgacagatcccagcacaggcttcgtgaatctgctgggcagaatcaactacaccaatgtgggcgacgcccgcaagtttttcgatcggtttaacgccatcagatatgacggcaagggcaatatcctgttcgacctggatctgtccagatttgatgtgagggtggagacacagaggaagctgtggacactgaccacattcggctctcgcatcgccaaatccaagaagtctggcaagtggatggtggagcggatcgagaacctgagcctgtgctttctggagctgttcgagcagtttaatatcggctacagagtggagaaggacctgaagaaggccatcctgagccaggataggaaggagttctatgtgcgcctgatctacctgtttaacctgatgatgcagatccggaacagcgacggcgaggaggattatatcctgtctcccgccctgaacgagaagaatctgcagttcgacagcaggctgatcgaggccaaggatctgcctgtggacgcagatgcaaacggagcatacaatgtggcccgcaagggcctgatggtggtgcagagaatcaagaggggcgaccacgagtccatccacaggatcggaagggcacagtggctgagatatgtgcaggagggcatcgtggagaaaaggccggcggccacgaaaaaggccggccaggcaaaaaagaaaaagggatcctacccatacgatgttccagattacgcttatccctacgacgtgcctgattatgcatacccatatgatgtccccgactatgcctaagaattc

SEQ ID NO: 1279 - protein, 2492 aa, Artificial Sequence
  Description of Artificial Sequence: Synthetic polypeptide
MKTQHFFEDFTSLYSLSKTIRFELKPIGKTLENIKKNGLIRRDEQRLDDYEKLKKVIDEYHEDFIANILSSFSFSEEILQSYIQNLSESEARAKIEKTMRDTLAKAFSEDERYKSIFKKELVKKDIPVWCPAYKSLCKKFDNFTTSLVPFHENRKNLYTSNEITASIPYRIVHVNLPKFIQNIEALCELQKKMGADLYLEMMENLRNVWPSFVKTPDDLCNLKTYNHLMVQSSISEYNRFVGGYSTEDGTKHQGINEWINIYRQRNKEMRLPGLVFLHKQILAKVDSSSFISDTLENDDQVFCVLRQFRKLFWNTVSSKEDDAASLKDLFCGLSGYDPEAIYVSDAHLATISKNIFDRWNYISDAIRRKTEVLMPRKKESVERYAEKISKQIKKRQSYSLAELDDLLAHYSEESLPAGFSLLSYFTSLGGQKYLVSDGEVILYEEGSNIWDEVLIAFRDLQVILDKDFTEKKLGKDEEAVSVIKKALDSALRLRKFFDLLSGTGAEIRRDSSFYALYTDRMDKLKGLLKMYDKVRNYLTKKPYSIEKFKLHFDNPSLLSGWDKNKELNNLSVIFRQNGYYYLGIMTPKGKNLFKTLPKLGAEEMFYEKMEYKQIAEPMLMLPKVFFPKKTKPAFAPDQSVVDIYNKKTFKTGQKGFNKKDLYRLIDFYKEALTVHEWKLFNFSFSPTEQYRNIGEFFDEVREQAYKVSMVNVPASYIDEAVENGKLYLFQIYNKDFSPYSKGIPNLHTLYWKALFSEQNQSRVYKLCGGGELFYRKASLHMQDTTVHPKGISIHKKNLNKKGETSLFNYDLVKDKRFTEDKFFFHVPISINYKNKKITNVNQMVRDYIAQNDDLQIIGIDRGERNLLYISRIDTRGNLLEQFSLNVIESDKGDLRTDYQKILGDREQERLRRRQEWKSIESIKDLKDGYMSQVVHKICNMVVEHKAIVVLENLNLSFMKGRKKVEKSVYEKFERMLVDKLNYLVVDKKNLSNEPGGLYAAYQLTNPLFSFEELHRYPQSGILFFVDPWNTSLTDPSTGFVNLLGRINYTNVGDARKFFDRFNAIRYDGKGNILFDLDLSRFDVRVETQRKLWTLTTFGSRIAKSKKSGKWMVERIENLSLCFLELFEQFNIGYRVEKDLKKAILSQDRKEFYVRLIYLFNLMMQIRNSDGEEDYILSPALNEKNLQFDSRLIEAKDLPVDADANGAYNVARKGLMVVQRIKRGDHESIHRIGRAQWLRYVQEGIVEMKTQHFFEDFTSLYSLSKTIRFELKPIGKTLENIKKNGLIRRDEQRLDDYEKLKKVIDEYHEDFIANILSSFSFSEEILQSYIQNLSESEARAKIEKTMRDTLAKAFSEDERYKSIFKKELVKKDIPVWCPAYKSLCKKFDNFTTSLVPFHENRKNLYTSNEITASIPYRIVHVNLPKFIQNIEALCELQKKMGADLYLEMMENLRNVWPSFVKTPDDLCNLKTYNHLMVQSSISEYNRFVGGYSTEDGTKHQGINEWINIYRQRNKEMRLPGLVFLHKQILAKVDSSSFISDTLENDDQVFCVLRQFRKLFWNTVSSKEDDAASLKDLFCGLSGYDPEAIYVSDAHLATISKNIFDRWNYISDAIRRKTEVLMPRKKESVERYAEKISKQIKKRQSYSLAELDDLLAHYSEESLPAGFSLLSYFTSLGGQKYLVSDGEVILYEEGSNIWDEVLIAFRDLQVILDKDFTEKKLGKDEEAVSVIKKALDSALRLRKFFDLLSGTGAEIRRDSSFYALYTDRMDKLKGLLKMYDKVRNYLTKKPYSIEKFKLHFDNPSLLSGWDKNKELNNLSVIFRQNGYYYLGIMTPKGKNLFKTLPKLGAEEMFYEKMEYKQIAEPMLMLPKVFFPKKTKPAFAPDQSVVDIYNKKTFKTGQKGFNKKDLYRLIDFYKEALTVHEWKLFNFSFSPTEQYRNIGEFFDEVREQAYKVSMVNVPASYIDEAVENGKLYLFQIYNKDFSPYSKGIPNLHTLYWKALFSEQNQSRVYKLCGGGELFYRKASLHMQDTTVHPKGISIHKKNLNKKGETSLFNYDLVKDKRFTEDKFFFHVPISINYKNKKITNVNQMVRDYIAQNDDLQIIGIDRGERNLLYISRIDTRGNLLEQFSLNVIESDKGDLRTDYQKILGDREQERLRRRQEWKSIESIKDLKDGYMSQVVHKICNMVVEHKAIVVLENLNLSFMKGRKKVEKSVYEKFERMLVDKLNYLVVDKKNLSNEPGGLYAAYQLTNPLFSFEELHRYPQSGILFFVDPWNTSLTDPSTGFVNLLGRINYTNVGDARKFFDRFNAIRYDGKGNILFDLDLSRFDVRVETQRKLWTLTTFGSRIAKSKKSGKWMVERIENLSLCFLELFEQFNIGYRVEKDLKKAILSQDRKEFYVRLIYLFNLMMQIRNSDGEEDYILSPALNEKNLQFDSRLIEAKDLPVDADANGAYNVARKGLMVVQRIKRGDHESIHRIGRAQWLRYVQEGIVE

SEQ ID NO: 1280 - RNA, 36 nt, Artificial Sequence; identical to SEQ ID NO: 49
  Description of Artificial Sequence: Synthetic oligonucleotide

SEQ ID NO: 1281 - RNA, 36 nt, Artificial Sequence; identical to SEQ ID NO: 49
  Description of Artificial Sequence: Synthetic oligonucleotide

SEQ ID NO: 1282 - RNA, 35 nt, Artificial Sequence
  Description of Artificial Sequence: Synthetic oligonucleotide
gcuauaaugccuauauaauuucuacuauuguagau

SEQ ID NO: 1283 - RNA, 35 nt, Artificial Sequence; identical to SEQ ID NO: 1282
  Description of Artificial Sequence: Synthetic oligonucleotide

SEQ ID NO: 1284 - RNA, 36 nt, Artificial Sequence
  Description of Artificial Sequence: Synthetic oligonucleotide
gccuauaaggcuuuaguaauuucuacuauuguagau

SEQ ID NO: 1285 - RNA, 36 nt, Artificial Sequence; identical to SEQ ID NO: 1284
  Description of Artificial Sequence: Synthetic oligonucleotide

SEQ ID NO: 1286 - RNA, 36 nt, Artificial Sequence
  Description of Artificial Sequence: Synthetic oligonucleotide
gucaauaagacucauuuaauuucuacuucgguagau

SEQ ID NO: 1287 - RNA, 36 nt, Artificial Sequence; identical to SEQ ID NO: 1286
  Description of Artificial Sequence: Synthetic oligonucleotide

SEQ ID NO: 1288 - RNA, 36 nt, Artificial Sequence
  Description of Artificial Sequence: Synthetic oligonucleotide
gucuagguacucucuuuaauuucuacuauuguagau

SEQ ID NO: 1289 - RNA, 36 nt, Artificial Sequence; identical to SEQ ID NO: 1288
  Description of Artificial Sequence: Synthetic oligonucleotide

SEQ ID NO: 1290 - RNA, 36 nt, Artificial Sequence
  Description of Artificial Sequence: Synthetic oligonucleotide
guuucaaagauuaaauaauuucuacuaaguguagau

SEQ ID NO: 1291 - RNA, 36 nt, Artificial Sequence; identical to SEQ ID NO: 1290
  Description of Artificial Sequence: Synthetic oligonucleotide

SEQ ID NO: 1292 - RNA, 36 nt, Artificial Sequence
  Description of Artificial Sequence: Synthetic oligonucleotide
cucuaaagagaggaaagaauuucuacuuuuguagau

SEQ ID NO: 1293 - RNA, 36 nt, Artificial Sequence; identical to SEQ ID NO: 1292
  Description of Artificial Sequence: Synthetic oligonucleotide

SEQ ID NO: 1294 - RNA, 36 nt, Artificial Sequence
  Description of Artificial Sequence: Synthetic oligonucleotide
gucuaacgaccuuuuaaauuucuacuguuuguagau

SEQ ID NO: 1295 - RNA, 36 nt, Artificial Sequence; identical to SEQ ID NO: 1294
  Description of Artificial Sequence: Synthetic oligonucleotide

SEQ ID NO: 1296 - RNA, 36 nt, Artificial Sequence
  Description of Artificial Sequence: Synthetic oligonucleotide
guuugaauaaccuuaaauaauuucuacuuuguagau

SEQ ID NO: 1297 - RNA, 36 nt, Artificial Sequence; identical to SEQ ID NO: 1296
  Description of Artificial Sequence: Synthetic oligonucleotide

SEQ ID NO: 1298 - RNA, 35 nt, Artificial Sequence
  Description of Artificial Sequence: Synthetic oligonucleotide
cucaaaacucauucgaaucucuacucuuuguagau

SEQ ID NO: 1299 - RNA, 35 nt, Artificial Sequence; identical to SEQ ID NO: 1298
  Description of Artificial Sequence: Synthetic oligonucleotide

SEQ ID NO: 1300 - RNA, 36 nt, Artificial Sequence
  Description of Artificial Sequence: Synthetic oligonucleotide
gcuuagaacauuuaaagaauuucuacuauuguagau

SEQ ID NO: 1301 - RNA, 36 nt, Artificial Sequence; identical to SEQ ID NO: 1300
  Description of Artificial Sequence: Synthetic oligonucleotide

SEQ ID NO: 1302 - RNA, 35 nt, Artificial Sequence
  Description of Artificial Sequence: Synthetic oligonucleotide
gucaaaagaccuuuuuaauuucuacucuuguagau

SEQ ID NO: 1303 - RNA, 35 nt, Artificial Sequence; identical to SEQ ID NO: 1302
  Description of Artificial Sequence: Synthetic oligonucleotide

SEQ ID NO: 1304 - RNA, 32 nt, Artificial Sequence
  Description of Artificial Sequence: Synthetic oligonucleotide
guuucaauccacgcgcccacgcggggcgcgac

SEQ ID NO: 1305 - RNA, 32 nt, Artificial Sequence; identical to SEQ ID NO: 1304
  Description of Artificial Sequence: Synthetic oligonucleotide

SEQ ID NO: 1306 - RNA, 36 nt, Artificial Sequence
  Description of Artificial Sequence: Synthetic oligonucleotide
gccaaauaccucuauaaaauuucuacuuuuguagau

SEQ ID NO: 1307 - RNA, 36 nt, Artificial Sequence; identical to SEQ ID NO: 1306
  Description of Artificial Sequence: Synthetic oligonucleotide

SEQ ID NO: 1308 - RNA, 36 nt, Artificial Sequence
  Description of Artificial Sequence: Synthetic oligonucleotide
guuuaaaaguccuauuggauuucuacuuuuguagau

SEQ ID NO: 1309 - RNA, 36 nt, Artificial Sequence; identical to SEQ ID NO: 1308
  Description of Artificial Sequence: Synthetic oligonucleotide

SEQ ID NO: 1310 - RNA, 35 nt, Artificial Sequence
  Description of Artificial Sequence: Synthetic oligonucleotide
guuuuagaaccuuaaaaauuaccuaguaauuaggu

SEQ ID NO: 1311 - RNA, 35 nt, Artificial Sequence; identical to SEQ ID NO: 1310
  Description of Artificial Sequence: Synthetic oligonucleotide

SEQ ID NO: 1312 - RNA, 36 nt, Artificial Sequence
  Description of Artificial Sequence: Synthetic oligonucleotide
guuuuggaguaccuuagaaaugcaugguucucaugc

SEQ ID NO: 1313 - RNA, 36 nt, Artificial Sequence; identical to SEQ ID NO: 1312
  Description of Artificial Sequence: Synthetic oligonucleotide

SEQ ID NO: 1314 - RNA, 77 nt, Artificial Sequence
  Description of Artificial Sequence: Synthetic oligonucleotide
gggacuuuaaauaauuucuacuguuguagauaggccccaguggcugcucugggggccuccgucuaagaacuuuaaau

SEQ ID NO: 1315 - RNA, 77 nt, Artificial Sequence
  Description of Artificial Sequence: Synthetic oligonucleotide
gggacuuuaaauaauuucuacuguuguagauucaucugugccccucccucccuggcccaggucuaagaacuuuaaau

SEQ ID NO: 1316 - RNA, 77 nt, Artificial Sequence
  Description of Artificial Sequence: Synthetic oligonucleotide
gggacuuuaaauaauuucuacuguuguagaugugguugcccacccuagucauuggagguggucuaagaacuuuaaau

SEQ ID NO: 1317 - RNA, 77 nt, Artificial Sequence
  Description of Artificial Sequence: Synthetic oligonucleotide
gggacuuuaaauaauuucuacuguuguagauggggccccaggccgggguccccucugaccgucuaagaacuuuaaau

SEQ ID NO: 1318 - DNA, 639 bp, Artificial Sequence
  Description of Artificial Sequence: Synthetic polynucleotide
ccatccccttctgtgaatgttagacccatgggagcagctggtcagaggggaccccggcctggggcccctaaccctatgtagcctcagtcttcccatcaggctctcagctcagcctgagtgttgaggccccagtggctgctctgggggcctcctgagtttctcatctgtgcccctccctccctggcccaggtgaaggtgtggttccagaaccggaggacaaagtacaaacggcagaagctggaggaggaagggcctgagtccgagcagaagaagaagggctcccatcacatcaaccggtggcgcattgccacgaagcaggccaatggggaggacatcgatgtcacctccaatgactagggtgggcaaccacaaacccacgagggcagagtgctgcttgctgctggccaggcccctgcgtgggcccaagctggactctggccactccctggccaggctttggggaggcctggagtcatggccccacagggcttgaagcccggggccgccattgacagagggacaagcaatgggctggctgaggcctgggaccacttggccttctcctcggagagcctgcctgcctgggcgggcccgcccgccaccgcagcctcccagctgctctccgtgtctccaatctcc

SEQ ID NO: 1319 - RNA, 106 nt, Artificial Sequence
  Description of Artificial Sequence: Synthetic polynucleotide
ggggucuaagaacuuuaaauaauuucuacuguuguagaugagaagucauuuaauaaggccacuguuaaaagucuaagaacuuuaaauaauuucuacuguuguagau

SEQ ID NO: 1320 - RNA, 100 nt, Artificial Sequence
  Description of Artificial Sequence: Synthetic polynucleotide
ggggaacuuuaaauaauuucuacuguuguagaugagaagucauuuaauaaggccacuguuaaaagucuaagaacuuuaaauaauuucuacuguuguagau

SEQ ID NO: 1321 - RNA, 94 nt, Artificial Sequence
  Description of Artificial Sequence: Synthetic oligonucleotide
ggguaaauaauuucuacuguuguagaugagaagucauuuaauaaggccacuguuaaaagucuaagaacuuuaaauaauuucuacuguuguagau

SEQ ID NO: 1322 - RNA, 88 nt, Artificial Sequence
  Description of Artificial Sequence: Synthetic oligonucleotide
gggauuucuacuguuguagaugagaagucauuuaauaaggccacuguuaaaagucuaagaacuuuaaauaauuucuacuguuguagau

SEQ ID NO: 1323 - RNA, 82 nt, Artificial Sequence
  Description of Artificial Sequence: Synthetic oligonucleotide
gggacuguuguagaugagaagucauuuaauaaggccacuguuaaaagucuaagaacuuuaaauaauuucuacuguuguagau

SEQ ID NO: 1324 - RNA, 36 nt, Artificial Sequence
  Description of Artificial Sequence: Synthetic oligonucleotide
gucuaagaaguuuaaauaauuucuacuguuguagau

SEQ ID NO: 1325 - DNA, 79 bp, Artificial Sequence
  Description of Artificial Sequence: Synthetic oligonucleotide
gggactttaaataatttctactgttgtagattagaagtcatttaataaggccactgttaaaagtctaagaactttaaat

SEQ ID NO: 1326 - DNA, 79 bp, Artificial Sequence
  Description of Artificial Sequence: Synthetic oligonucleotide
gggactttaaataatttctactgttgtagatgaggagtcatttaataaggccactgttaaaagtctaagaactttaaat

SEQ ID NO: 1327 - DNA, 79 bp, Artificial Sequence
  Description of Artificial Sequence: Synthetic oligonucleotide
gggactttaaataatttctactgttgtagatgagaagccatttaataaggccactgttaaaagtctaagaactttaaat

SEQ ID NO: 1328 - DNA, 79 bp, Artificial Sequence
  Description of Artificial Sequence: Synthetic oligonucleotide
gggactttaaataatttctactgttgtagatgagaagtcaattaataaggccactgttaaaagtctaagaactttaaat

SEQ ID NO: 1329 - DNA, 79 bp, Artificial Sequence
  Description of Artificial Sequence: Synthetic oligonucleotide
gggactttaaataatttctactgttgtagatgagaagtcattttataaggccactgttaaaagtctaagaactttaaat

SEQ ID NO: 1330 - DNA, 79 bp, Artificial Sequence
  Description of Artificial Sequence: Synthetic oligonucleotide
gggactttaaataatttctactgttgtagatgagaagtcatttaatgaggccactgttaaaagtctaagaactttaaat

SEQ ID NO: 1331 - DNA, 79 bp, Artificial Sequence
  Description of Artificial Sequence: Synthetic oligonucleotide
gggactttaaataatttctactgttgtagatgagaagtcatttaataagcccactgttaaaagtctaagaactttaaat

SEQ ID NO: 1332 - DNA, 79 bp, Artificial Sequence
  Description of Artificial Sequence: Synthetic oligonucleotide
gggactttaaataatttctactgttgtagatgagaagtcatttaataaggcctctgttaaaagtctaagaactttaaat

SEQ ID NO: 1333 - DNA, 79 bp, Artificial Sequence
  Description of Artificial Sequence: Synthetic oligonucleotide
gggactttaaataatttctactgttgtagatgagaagtcatttaataaggccactattaaaagtctaagaactttaaat

SEQ ID NO: 1334 - DNA, 79 bp, Artificial Sequence
  Description of Artificial Sequence: Synthetic oligonucleotide
gggactttaaataatttctactgttgtagatgagaagtcatttaataaggccactgtttaaagtctaagaactttaaat

SEQ ID NO: 1335 - DNA, 79 bp, Artificial Sequence
  Description of Artificial Sequence: Synthetic oligonucleotide
gggactttaaataatttctactgttgtagatgagaagtcatttaataaggccactgttaaaggtctaagaactttaaat

SEQ ID NO: 1336 - RNA, 76 nt, Artificial Sequence
  Description of Artificial Sequence: Synthetic oligonucleotide
acuuuaaauaauuucuacuguuguagaugagaagucauuuaauaaggccacuguuaaaagucuaagaacuuuaaau

SEQ ID NO: 1337 - RNA, 36 nt, Artificial Sequence; identical to SEQ ID NO: 1324
  Description of Artificial Sequence: Synthetic oligonucleotide

SEQ ID NO: 1338 - RNA, 35 nt, Artificial Sequence; identical to SEQ ID NO: 1282
  Description of Artificial Sequence: Synthetic oligonucleotide

SEQ ID NO: 1339 - RNA, 43 nt, Artificial Sequence
  Description of Artificial Sequence: Synthetic oligonucleotide
  modified_base (20)..(43): a, c, u, g, unknown or other
aauuucuacuguuguagaunnnnnnnnnnnnnnnnnnnnnnnn

SEQ ID NO: 1340 - RNA, 43 nt, Artificial Sequence; identical to SEQ ID NO: 1339
  Description of Artificial Sequence: Synthetic oligonucleotide
  modified_base (20)..(43): a, c, u, g, unknown or other

SEQ ID NO: 1341 - RNA, 43 nt, Artificial Sequence
  Description of Artificial Sequence: Synthetic oligonucleotide
  modified_base (20)..(43): a, c, u, g, unknown or other
aauuucuacuauuguagaunnnnnnnnnnnnnnnnnnnnnnnn

SEQ ID NO: 1342 - RNA, 43 nt, Artificial Sequence; identical to SEQ ID NO: 1341
  Description of Artificial Sequence: Synthetic oligonucleotide
  modified_base (20)..(43): a, c, u, g, unknown or other

SEQ ID NO: 1343 - DNA, 21 bp, Artificial Sequence
  Description of Artificial Sequence: Synthetic oligonucleotide
ttaataaggccactgttaaaa

SEQ ID NO: 1344 - DNA, 14 bp, Artificial Sequence
  Description of Artificial Sequence: Synthetic oligonucleotide
  modified_base (14)..(14): a, c, t, g, unknown or other
ttaataaggccacn

SEQ ID NO: 1345 - DNA, 13 bp, Artificial Sequence
  Description of Artificial Sequence: Synthetic oligonucleotide
gccactgttaaaa

SEQ ID NO: 1346 - RNA, 43 nt, Artificial Sequence
  Description of Artificial Sequence: Synthetic oligonucleotide
aauuucuacuuguguagaugagaagucauuuaauaaggccacu

SEQ ID NO: 1347 - RNA, 22 nt, Artificial Sequence
  Description of Artificial Sequence: Synthetic oligonucleotide
gagaagucauuuaauaaggcca

SEQ ID NO: 1348 - RNA, 20 nt, Artificial Sequence
  Description of Artificial Sequence: Synthetic oligonucleotide
gagaagucauuuaauaaggc

SEQ ID NO: 1349 - RNA, 18 nt, Artificial Sequence
  Description of Artificial Sequence: Synthetic oligonucleotide
gagaagucauuuaauaag

SEQ ID NO: 1350 - RNA, 17 nt, Artificial Sequence
  Description of Artificial Sequence: Synthetic oligonucleotide
gagaagucauuuaauaa

SEQ ID NO: 1351 - RNA, 16 nt, Artificial Sequence
  Description of Artificial Sequence: Synthetic oligonucleotide
gagaagucauuuaaua

SEQ ID NO: 1352 - RNA, 15 nt, Artificial Sequence
  Description of Artificial Sequence: Synthetic oligonucleotide
gagaagucauuuaau

SEQ ID NO: 1353 - DNA, 68 bp, Artificial Sequence
  Description of Artificial Sequence: Synthetic oligonucleotide
gaattatctgaaggcacaggaatagtagcatctacaacagtagaaattatttaaagttcttagacttt

SEQ ID NO: 1354 - DNA, 14 bp, Artificial Sequence
  Description of Artificial Sequence: Synthetic oligonucleotide
atctacaaccagta

SEQ ID NO: 1355 - DNA, 41 bp, Artificial Sequence
  Description of Artificial Sequence: Synthetic oligonucleotide
tctgaaggcacggaatagtagcatctacaacagtagaaatt

SEQ ID NO: 1356 - DNA, 41 bp, Artificial Sequence; identical to SEQ ID NO: 1355
  Description of Artificial Sequence: Synthetic oligonucleotide

SEQ ID NO: 1357 - DNA, 41 bp, Artificial Sequence; identical to SEQ ID NO: 1355
  Description of Artificial Sequence: Synthetic oligonucleotide

SEQ ID NO: 1358 - DNA, 14 bp, Artificial Sequence
  Description of Artificial Sequence: Synthetic oligonucleotide
atctacaaccagta

SEQ ID NO: 1359 - DNA, 14 bp, Artificial Sequence
  Description of Artificial Sequence: Synthetic oligonucleotide
atctacaaccagta

SEQ ID NO: 1360 - DNA, 14 bp, Artificial Sequence
  Description of Artificial Sequence: Synthetic oligonucleotide
atctacaaccagta

SEQ ID NO: 1361 - DNA, 14 bp, Artificial Sequence
  Description of Artificial Sequence: Synthetic oligonucleotide
atctacaaccagta

SEQ ID NO: 1362 - DNA, 14 bp, Artificial Sequence
  Description of Artificial Sequence: Synthetic oligonucleotide
atctacaaccagta

SEQ ID NO: 1363 - DNA, 14 bp, Artificial Sequence
  Description of Artificial Sequence: Synthetic oligonucleotide
atctacaaccagta

SEQ ID NO: 1364 - DNA, 14 bp, Artificial Sequence
  Description of Artificial Sequence: Synthetic oligonucleotide
atctacaaccagta

SEQ ID NO: 1365 - DNA, 23 bp, Artificial Sequence
  Description of Artificial Sequence: Synthetic oligonucleotide
tctgaaggcacggaatagtagca

SEQ ID NO: 1366 - DNA, 23 bp, Artificial Sequence
  Description of Artificial Sequence: Synthetic oligonucleotide
tctgaaggcacggaatagtagca

SEQ ID NO: 1367 - DNA, 23 bp, Artificial Sequence
  Description of Artificial Sequence: Synthetic oligonucleotide
tctgaaggcacggaatagtagca

SEQ ID NO: 1368 - DNA, 23 bp, Artificial Sequence
  Description of Artificial Sequence: Synthetic oligonucleotide
tctgaaggcacggaatagtagca

SEQ ID NO: 1369 - DNA, 23 bp, Artificial Sequence
  Description of Artificial Sequence: Synthetic oligonucleotide
tctgaaggcacggaatagtagca

SEQ ID NO: 1370 - DNA, 23 bp, Artificial Sequence
  Description of Artificial Sequence: Synthetic oligonucleotide
tctgaaggcacggaatagtagca

SEQ ID NO: 1371 - DNA, 23 bp, Artificial Sequence
  Description of Artificial Sequence: Synthetic oligonucleotide
tctgaaggcacggaatagtagca

SEQ ID NO: 1372 - DNA, 23 bp, Artificial Sequence
  Description of Artificial Sequence: Synthetic oligonucleotide
tctgaaggcacggaatagtagca

SEQ ID NO: 1373 - DNA, 23 bp, Artificial Sequence
  Description of Artificial Sequence: Synthetic oligonucleotide
tctgaaggcacggaatagtagca

SEQ ID NO: 1374 - DNA, 23 bp, Artificial Sequence
  Description of Artificial Sequence: Synthetic oligonucleotide
tctgaaggcacggaatagtagca

SEQ ID NO: 1375 - DNA, 23 bp, Artificial Sequence
  Description of Artificial Sequence: Synthetic oligonucleotide
tctgaaggcacggaatagtagca

SEQ ID NO: 1376 - DNA, 23 bp, Artificial Sequence
  Description of Artificial Sequence: Synthetic oligonucleotide
tctgaaggcacggaatagtagca

SEQ ID NO: 1377 - DNA, 23 bp, Artificial Sequence
  Description of Artificial Sequence: Synthetic oligonucleotide
tctgaaggcacggaatagtagca

SEQ ID NO: 1378 - DNA, 23 bp, Artificial Sequence
  Description of Artificial Sequence: Synthetic oligonucleotide
tctgaaggcacggaatagtagca

SEQ ID NO: 1379 - DNA, 23 bp, Artificial Sequence
  Description of Artificial Sequence: Synthetic oligonucleotide
tctgaaggcacggaatagtagca

SEQ ID NO: 1380 - DNA, 23 bp, Artificial Sequence
  Description of Artificial Sequence: Synthetic oligonucleotide
tctgaaggcacggaatagtagca

SEQ ID NO: 1381 - DNA, 23 bp, Artificial Sequence
  Description of Artificial Sequence: Synthetic oligonucleotide
tctgaaggcacggaatagtagca

SEQ ID NO: 1382 - DNA, 23 bp, Artificial Sequence
  Description of Artificial Sequence: Synthetic oligonucleotide
tctgaaggcacggaatagtagca

SEQ ID NO: 1383 - DNA, 23 bp, Artificial Sequence
  Description of Artificial Sequence: Synthetic oligonucleotide
tctgaaggcacggaatagtagca

SEQ ID NO: 1384 - DNA, 23 bp, Artificial Sequence
  Description of Artificial Sequence: Synthetic oligonucleotide
tctgaaggcacggaatagtagca

SEQ ID NO: 1385 - DNA, 23 bp, Artificial Sequence
  Description of Artificial Sequence: Synthetic oligonucleotide
tctgaaggcacggaatagtagca

SEQ ID NO: 1386 - DNA, 23 bp, Artificial Sequence
  Description of Artificial Sequence: Synthetic oligonucleotide
tctgaaggcacggaatagtagca

SEQ ID NO: 1387 - DNA, 23 bp, Artificial Sequence
  Description of Artificial Sequence: Synthetic oligonucleotide
tctgaaggcacggaatagtagca

SEQ ID NO: 1388 - DNA, 23 bp, Artificial Sequence
  Description of Artificial Sequence: Synthetic oligonucleotide
tctgaaggcacggaatagtagca

SEQ ID NO: 1389 - DNA, 23 bp, Artificial Sequence
  Description of Artificial Sequence: Synthetic oligonucleotide
tctgaaggcacggaatagtagca

SEQ ID NO: 1390 - DNA, 23 bp, Artificial Sequence
  Description of Artificial Sequence: Synthetic oligonucleotide
tctgaaggcacggaatagtagca

SEQ ID NO: 1391 - DNA, 23 bp, Artificial Sequence
  Description of Artificial Sequence: Synthetic oligonucleotide
tctgaaggcacggaatagtagca

SEQ ID NO: 1392 - DNA, 23 bp, Artificial Sequence
  Description of Artificial Sequence: Synthetic oligonucleotide
tctgaaggcacggaatagtagca

SEQ ID NO: 1393 - DNA, 23 bp, Artificial Sequence
  Description of Artificial Sequence: Synthetic oligonucleotide
tctgaaggcacggaatagtagca

SEQ ID NO: 1394 - DNA, 23 bp, Artificial Sequence
  Description of Artificial Sequence: Synthetic oligonucleotide
tctgaaggcacggaatagtagca

SEQ ID NO: 1395 - DNA, 23 bp, Artificial Sequence
  Description of Artificial Sequence: Synthetic oligonucleotide
tctgaaggcacggaatagtagca

SEQ ID NO: 1396 - DNA, 23 bp, Artificial Sequence
  Description of Artificial Sequence: Synthetic oligonucleotide
tctgaaggcacggaatagtagca

SEQ ID NO: 1397 - DNA, 23 bp, Artificial Sequence
  Description of Artificial Sequence: Synthetic oligonucleotide
tctgaaggcacggaatagtagca

SEQ ID NO: 1398 - DNA, 23 bp, Artificial Sequence
  Description of Artificial Sequence: Synthetic oligonucleotide
tctgaaggcacggaatagtagca

SEQ ID NO: 1399 - DNA, 23 bp, Artificial Sequence
  Description of Artificial Sequence: Synthetic oligonucleotide
tctgaaggcacggaatagtagca

SEQ ID NO: 1400 - DNA, 23 bp, Artificial Sequence
  Description of Artificial Sequence: Synthetic oligonucleotide
tctgaaggcacggaatagtagca

SEQ ID NO: 1401 - DNA, 14 bp, Artificial Sequence
  Description of Artificial Sequence: Synthetic oligonucleotide
atctacaaccagta

SEQ ID NO: 1402 - DNA, 65 bp, Artificial Sequence
  Description of Artificial Sequence: Synthetic oligonucleotide
ggtacccggggatcctttagagaagtcatttaataaggccactgttaaaaagcttggcgtaatca

SEQ ID NO: 1403 - RNA, 43 nt, Artificial Sequence
  Description of Artificial Sequence: Synthetic oligonucleotide
aauuucuacuguuguagaugagaagucauuuaauaaggccacu

SEQ ID NO: 1404 - DNA, 21 bp, Artificial Sequence
  Description of Artificial Sequence: Synthetic oligonucleotide
ttaataaggccactgttaaaa

SEQ ID NO: 1405 - DNA, 14 bp, Artificial Sequence
  Description of Artificial Sequence: Synthetic oligonucleotide
  modified_base (1)..(1): a, c, t, g, unknown or other
ngccactgttaaaa

SEQ ID NO: 1406 - DNA, 14 bp, Artificial Sequence
  Description of Artificial Sequence: Synthetic oligonucleotide
  modified_base (14)..(14): a, c, t, g, unknown or other
ttaataaggccacn

SEQ ID NO: 1407 - RNA, 43 nt, Artificial Sequence; identical to SEQ ID NO: 1403
  Description of Artificial Sequence: Synthetic oligonucleotide

SEQ ID NO: 1408 - RNA, 22 nt, Artificial Sequence
  Description of Artificial Sequence: Synthetic oligonucleotide
gagaagucauuuaauaaggcca

SEQ ID NO: 1409 - RNA, 20 nt, Artificial Sequence
  Description of Artificial Sequence: Synthetic oligonucleotide
gagaagucauuuaauaaggc

SEQ ID NO: 1410 - RNA, 18 nt, Artificial Sequence
  Description of Artificial Sequence: Synthetic oligonucleotide
gagaagucauuuaauaag

SEQ ID NO: 1411 - RNA, 17 nt, Artificial Sequence
  Description of Artificial Sequence: Synthetic oligonucleotide
gagaagucauuuaauaa

SEQ ID NO: 1412 - RNA, 16 nt, Artificial Sequence
  Description of Artificial Sequence: Synthetic oligonucleotide
gagaagucauuuaaua

SEQ ID NO: 1413 - RNA, 15 nt, Artificial Sequence
  Description of Artificial Sequence: Synthetic oligonucleotide
gagaagucauuuaau

SEQ ID NO: 1414 - RNA, 43 nt, Artificial Sequence; identical to SEQ ID NO: 1403
  Description of Artificial Sequence: Synthetic oligonucleotide

SEQ ID NO: 1415 - RNA, 22 nt, Artificial Sequence
  Description of Artificial Sequence: Synthetic oligonucleotide
gagaagucauuuaauaaggcca

SEQ ID NO: 1416 - RNA, 20 nt, Artificial Sequence
  Description of Artificial Sequence: Synthetic oligonucleotide
gagaagucauuuaauaaggc

SEQ ID NO: 1417 - RNA, 18 nt, Artificial Sequence
  Description of Artificial Sequence: Synthetic oligonucleotide
gagaagucauuuaauaag

SEQ ID NO: 1418 - RNA, 17 nt, Artificial Sequence
  Description of Artificial Sequence: Synthetic oligonucleotide
gagaagucauuuaauaa

SEQ ID NO: 1419 - RNA, 16 nt, Artificial Sequence
  Description of Artificial Sequence: Synthetic oligonucleotide
gagaagucauuuaaua

SEQ ID NO: 1420 - RNA, 15 nt, Artificial Sequence
  Description of Artificial Sequence: Synthetic oligonucleotide
gagaagucauuuaau

SEQ ID NO: 1421 - RNA, 43 nt, Artificial Sequence; identical to SEQ ID NO: 1403
  Description of Artificial Sequence: Synthetic oligonucleotide

SEQ ID NO: 1422 - RNA, 16 nt, Artificial Sequence
  Description of Artificial Sequence: Synthetic oligonucleotide
aauuucuacuguugua

SEQ ID NO: 1423 - RNA, 16 nt, Artificial Sequence
  Description of Artificial Sequence: Synthetic oligonucleotide
aauuucuacuguugua

SEQ ID NO: 1424 - RNA, 16 nt, Artificial Sequence
  Description of Artificial Sequence: Synthetic oligonucleotide
aauuucuacuguugua

SEQ ID NO: 1425 - RNA, 16 nt, Artificial Sequence
  Description of Artificial Sequence: Synthetic oligonucleotide
aauuucuacuguugua

SEQ ID NO: 1426 - RNA, 16 nt, Artificial Sequence
  Description of Artificial Sequence: Synthetic oligonucleotide
aauuucuacuguugua

SEQ ID NO: 1427 - RNA, 16 nt, Artificial Sequence
  Description of Artificial Sequence: Synthetic oligonucleotide
aauuucuacuguugua

SEQ ID NO: 1428 - RNA, 16 nt, Artificial Sequence
  Description of Artificial Sequence: Synthetic oligonucleotide
aauuucuacuguugua

SEQ ID NO: 1429 - RNA, 16 nt, Artificial Sequence
  Description of Artificial Sequence: Synthetic oligonucleotide
aauuucuacuguugua

SEQ ID NO: 1430 - RNA, 16 nt, Artificial Sequence
  Description of Artificial Sequence: Synthetic oligonucleotide
aauuucuacuguugua

SEQ ID NO: 1431 - RNA, 16 nt, Artificial Sequence
  Description of Artificial Sequence: Synthetic oligonucleotide
aauuucuacuguugua

SEQ ID NO: 1432 - RNA, 16 nt, Artificial Sequence
  Description of Artificial Sequence: Synthetic oligonucleotide
aauuucuacuguugua

SEQ ID NO: 1433 - RNA, 16 nt, Artificial Sequence
  Description of Artificial Sequence: Synthetic oligonucleotide
aauuucuacuguugua

SEQ ID NO: 1434 - RNA, 37 nt, Artificial Sequence
  Description of Artificial Sequence: Synthetic oligonucleotide
gucuaagaacuuuaaauaauuucuacugguuguagau

SEQ ID NO: 1435 - RNA, 37 nt, Artificial Sequence; identical to SEQ ID NO: 1434
  Description of Artificial Sequence: Synthetic oligonucleotide

SEQ ID NO: 1436 - RNA, 37 nt, Artificial Sequence; identical to SEQ ID NO: 1434
  Description of Artificial Sequence: Synthetic oligonucleotide

SEQ ID NO: 1437 - RNA, 37 nt, Artificial Sequence; identical to SEQ ID NO: 1434
  Description of Artificial Sequence: Synthetic oligonucleotide

SEQ ID NO: 1438 - RNA, 37 nt, Artificial Sequence; identical to SEQ ID NO: 1434
  Description of Artificial Sequence: Synthetic oligonucleotide

SEQ ID NO: 1439 - RNA, 37 nt, Artificial Sequence; identical to SEQ ID NO: 1434
  Description of Artificial Sequence: Synthetic oligonucleotide

SEQ ID NO: 1440 - RNA, 37 nt, Artificial Sequence; identical to SEQ ID NO: 1434
  Description of Artificial Sequence: Synthetic oligonucleotide

SEQ ID NO: 1441 - RNA, 37 nt, Artificial Sequence; identical to SEQ ID NO: 1434
  Description of Artificial Sequence: Synthetic oligonucleotide

SEQ ID NO: 1442 - RNA, 37 nt, Artificial Sequence; identical to SEQ ID NO: 1434
  Description of Artificial Sequence: Synthetic oligonucleotide

SEQ ID NO: 1443 - RNA, 37 nt, Artificial Sequence; identical to SEQ ID NO: 1434
  Description of Artificial Sequence: Synthetic oligonucleotide

SEQ ID NO: 1444 - RNA, 37 nt, Artificial Sequence; identical to SEQ ID NO: 1434
  Description of Artificial Sequence: Synthetic oligonucleotide

SEQ ID NO: 1445 - RNA, 37 nt, Artificial Sequence; identical to SEQ ID NO: 1434
  Description of Artificial Sequence: Synthetic oligonucleotide

SEQ ID NO: 1446 - RNA, 37 nt, Artificial Sequence; identical to SEQ ID NO: 1434
  Description of Artificial Sequence: Synthetic oligonucleotide

SEQ ID NO: 1447 - RNA, 37 nt, Artificial Sequence; identical to SEQ ID NO: 1434
  Description of Artificial Sequence: Synthetic oligonucleotide

SEQ ID NO: 1448 - RNA, 37 nt, Artificial Sequence; identical to SEQ ID NO: 1434
  Description of Artificial Sequence: Synthetic oligonucleotide

SEQ ID NO: 1449 - RNA, 37 nt, Artificial Sequence; identical to SEQ ID NO: 1434
  Description of Artificial Sequence: Synthetic oligonucleotide

SEQ ID NO: 1450 - RNA, 16 nt, Artificial Sequence
  Description of Artificial Sequence: Synthetic oligonucleotide
aauuucuacuguugua

SEQ ID NO: 1451 - RNA, 16 nt, Artificial Sequence
  Description of Artificial Sequence: Synthetic oligonucleotide
aauuucuacuguugua

SEQ ID NO: 1452 - RNA, 16 nt, Artificial Sequence
  Description of Artificial Sequence: Synthetic oligonucleotide
aauuucuacuguugua

SEQ ID NO: 1453 - RNA, 16 nt, Artificial Sequence
  Description of Artificial Sequence: Synthetic oligonucleotide
aauuucuacuguugua

SEQ ID NO: 1454 - DNA, 36 bp, Artificial Sequence
  Description of Artificial Sequence: Synthetic oligonucleotide
aatgtttcctgatggtccatgtctgttactcgcctg

SEQ ID NO: 1455 - DNA, 36 bp, Artificial Sequence; identical to SEQ ID NO: 1454
  Description of Artificial Sequence: Synthetic oligonucleotide

SEQ ID NO: 1456 - DNA, 36 bp, Artificial Sequence; identical to SEQ ID NO: 1454
  Description of Artificial Sequence: Synthetic oligonucleotide

SEQ ID NO: 1457 - DNA, 36 bp, Artificial Sequence; identical to SEQ ID NO: 1454
  Description of Artificial Sequence: Synthetic oligonucleotide

SEQ ID NO: 1458 - DNA, 36 bp, Artificial Sequence; identical to SEQ ID NO: 1454
  Description of Artificial Sequence: Synthetic oligonucleotide

SEQ ID NO: 1459 - DNA, 36 bp, Artificial Sequence; identical to SEQ ID NO: 1454
  Description of Artificial Sequence: Synthetic oligonucleotide

SEQ ID NO: 1460 - DNA, 36 bp, Artificial Sequence; identical to SEQ ID NO: 1454
  Description of Artificial Sequence: Synthetic oligonucleotide

SEQ ID NO: 1461 - DNA, 36 bp, Artificial Sequence; identical to SEQ ID NO: 1454
  Description of Artificial Sequence: Synthetic oligonucleotide

SEQ ID NO: 1462 - DNA, 36 bp, Artificial Sequence; identical to SEQ ID NO: 1454
  Description of Artificial Sequence: Synthetic oligonucleotide

SEQ ID NO: 1463 - DNA, 36 bp, Artificial Sequence; identical to SEQ ID NO: 1454
  Description of Artificial Sequence: Synthetic oligonucleotide

SEQ ID NO: 1464 - DNA, 36 bp, Artificial Sequence; identical to SEQ ID NO: 1454
  Description of Artificial Sequence: Synthetic oligonucleotide

SEQ ID NO: 1465 - DNA, 36 bp, Artificial Sequence; identical to SEQ ID NO: 1454
  Description of Artificial Sequence: Synthetic oligonucleotide

SEQ ID NO: 1466 - DNA, 27 bp, Artificial Sequence
  Description of Artificial Sequence: Synthetic oligonucleotide
tttccctcactcctgctcggtgaattt

SEQ ID NO: 1467 - DNA, 27 bp, Artificial Sequence
  Description of Artificial Sequence: Synthetic oligonucleotide
tttccctcactcctgctcggtgaattt

SEQ ID NO: 1468 - DNA, 27 bp, Artificial Sequence
  Description of Artificial Sequence: Synthetic oligonucleotide
tttccctcactcctgctcggtgaattt

SEQ ID NO: 1469 - DNA, 27 bp, Artificial Sequence
  Description of Artificial Sequence: Synthetic oligonucleotide
tttccctcactcctgctcggtgaattt

SEQ ID NO: 1470 - DNA, 23 bp, Artificial Sequence
  Description of Artificial Sequence: Synthetic oligonucleotide
tcactcctgctcggtgaatttgg

SEQ ID NO: 1471 - DNA, 23 bp, Artificial Sequence
  Description of Artificial Sequence: Synthetic oligonucleotide
tcactcctgctcggtgaatttgg

SEQ ID NO: 1472 - DNA, 23 bp, Artificial Sequence
  Description of Artificial Sequence: Synthetic oligonucleotide
tcactcctgctcggtgaatttgg

SEQ ID NO: 1473 - DNA, 23 bp, Artificial Sequence
  Description of Artificial Sequence: Synthetic oligonucleotide
tcactcctgctcggtgaatttgg

SEQ ID NO: 1474 - DNA, 27 bp, Artificial Sequence
  Description of Artificial Sequence: Synthetic oligonucleotide
tttccctcactcctgctcggtgaattt

SEQ ID NO: 1475 - DNA, 27 bp, Artificial Sequence
  Description of Artificial Sequence: Synthetic oligonucleotide
tttccctcactcctgctcggtgaattt

SEQ ID NO: 1476 - DNA, 14 bp, Artificial Sequence
  Description of Artificial Sequence: Synthetic oligonucleotide
  modified_base (1)..(1): a, c, t, g, unknown or other
ngccactgttaaaa

SEQ ID NO: 1477 - DNA, 14 bp, Artificial Sequence
  Description of Artificial Sequence: Synthetic oligonucleotide
  modified_base (1)..(1): a, c, t, g, unknown or other
ngccactgttaaaa

SEQ ID NO: 1478 - DNA, 27 bp, Artificial Sequence
  Description of Artificial Sequence: Synthetic oligonucleotide
tttccctcactcctgctcggtgaattt

SEQ ID NO: 1479 - DNA, 27 bp, Artificial Sequence
  Description of Artificial Sequence: Synthetic oligonucleotide
tttccctcactcctgctcggtgaattt

SEQ ID NO: 1480 - DNA, 27 bp, Artificial Sequence
  Description of Artificial Sequence: Synthetic oligonucleotide
tttccctcactcctgctcggtgaattt

SEQ ID NO: 1481 - DNA, 14 bp, Artificial Sequence
  Description of Artificial Sequence: Synthetic oligonucleotide
  modified_base (1)..(1): a, c, t, g, unknown or other
ngccactgttaaaa

SEQ ID NO: 1482 - DNA, 14 bp, Artificial Sequence
  Description of Artificial Sequence: Synthetic oligonucleotide
  modified_base (1)..(1): a, c, t, g, unknown or other
ngccactgttaaaa

SEQ ID NO: 1483 - DNA, 27 bp, Artificial Sequence
  Description of Artificial Sequence: Synthetic oligonucleotide
tttccctcactcctgctcggtgaattt

SEQ ID NO: 1484 - DNA, 27 bp, Artificial Sequence
  Description of Artificial Sequence: Synthetic oligonucleotide
tttccctcactcctgctcggtgaattt

SEQ ID NO: 1485 - DNA, 14 bp, Artificial Sequence
  Description of Artificial Sequence: Synthetic oligonucleotide
  modified_base (1)..(1): a, c, t, g, unknown or other
ngccactgttaaaa

SEQ ID NO: 1486 - DNA, 14 bp, Artificial Sequence
  Description of Artificial Sequence: Synthetic oligonucleotide
  modified_base (1)..(1): a, c, t, g, unknown or other
ngccactgttaaaa

SEQ ID NO: 1487 - DNA, 27 bp, Artificial Sequence
  Description of Artificial Sequence: Synthetic oligonucleotide
tttccctcactcctgctcggtgaattt

SEQ ID NO: 1488 - DNA, 27 bp, Artificial Sequence
  Description of Artificial Sequence: Synthetic oligonucleotide
tttccctcactcctgctcggtgaattt

SEQ ID NO: 1489 - DNA, 27 bp, Artificial Sequence
  Description of Artificial Sequence: Synthetic oligonucleotide
tttccctcactcctgctcggtgaattt

SEQ ID NO: 1490 - DNA, 27 bp, Artificial Sequence
  Description of Artificial Sequence: Synthetic oligonucleotide
tttccctcactcctgctcggtgaattt

SEQ ID NO: 1491 - DNA, 14 bp, Artificial Sequence
  Description of Artificial Sequence: Synthetic oligonucleotide
  modified_base (1)..(1): a, c, t, g, unknown or other
ngccactgttaaaa

SEQ ID NO: 1492 - DNA, 14 bp, Artificial Sequence
  Description of Artificial Sequence: Synthetic oligonucleotide
  modified_base (1)..(1): a, c, t, g, unknown or other
ngccactgttaaaa

SEQ ID NO: 1493 - DNA, 27 bp, Artificial Sequence
  Description of Artificial Sequence: Synthetic oligonucleotide
tttccctcactcctgctcggtgaattt

SEQ ID NO: 1494 - DNA, 27 bp, Artificial Sequence
  Description of Artificial Sequence: Synthetic oligonucleotide
tttccctcactcctgctcggtgaattt

SEQ ID NO: 1495 - protein, 1300 aa, Artificial Sequence; identical to SEQ ID NO: 48
  Description of Artificial Sequence: Synthetic polypeptide

SEQ ID NO: 1496 - protein, 1300 aa, Artificial Sequence; identical to SEQ ID NO: 48
  Description of Artificial Sequence: Synthetic polypeptide

SEQ ID NO: 1497 - protein, 1300 aa, Artificial Sequence; identical to SEQ ID NO: 48
  Description of Artificial Sequence: Synthetic polypeptide

SEQ ID NO: 1498 - RNA, 43 nt, Artificial Sequence
  Description of Artificial Sequence: Synthetic oligonucleotide
  modified_base (21)..(43): a, c, u, g, unknown or other
uaauuucuacuguuguagaunnnnnnnnnnnnnnnnnnnnnnn

SEQ ID NO: 1499 - RNA, 43 nt, Artificial Sequence; identical to SEQ ID NO: 1498
  Description of Artificial Sequence: Synthetic oligonucleotide
  modified_base (21)..(43): a, c, u, g, unknown or other

SEQ ID NO: 1500 - RNA, 43 nt, Artificial Sequence; identical to SEQ ID NO: 1498
  Description of Artificial Sequence: Synthetic oligonucleotide
  modified_base (21)..(43): a, c, u, g, unknown or other

SEQ ID NO: 1501 - RNA, 43 nt, Artificial Sequence; identical to SEQ ID NO: 1498
  Description of Artificial Sequence: Synthetic oligonucleotide
  modified_base (21)..(43): a, c, u, g, unknown or other

SEQ ID NO: 1502 - RNA, 43 nt, Artificial Sequence; identical to SEQ ID NO: 1498
  Description of Artificial Sequence: Synthetic oligonucleotide
  modified_base (21)..(43): a, c, u, g, unknown or other

SEQ ID NO: 1503 - RNA, 43 nt, Artificial Sequence; identical to SEQ ID NO: 1498
  Description of Artificial Sequence: Synthetic oligonucleotide
  modified_base (21)..(43): a, c, u, g, unknown or other

SEQ ID NO: 1504 - RNA, 43 nt, Artificial Sequence; identical to SEQ ID NO: 1498
  Description of Artificial Sequence: Synthetic oligonucleotide
  modified_base (21)..(43): a, c, u, g, unknown or other

SEQ ID NO: 1505 - RNA, 43 nt, Artificial Sequence; identical to SEQ ID NO: 1498
  Description of Artificial Sequence: Synthetic oligonucleotide
  modified_base (21)..(43): a, c, u, g, unknown or other

SEQ ID NO: 1506 - RNA, 43 nt, Artificial Sequence; identical to SEQ ID NO: 1498
  Description of Artificial Sequence: Synthetic oligonucleotide
  modified_base (21)..(43): a, c, u, g, unknown or other

SEQ ID NO: 1507 - RNA, 43 nt, Artificial Sequence; identical to SEQ ID NO: 1498
  Description of Artificial Sequence: Synthetic oligonucleotide
  modified_base (21)..(43): a, c, u, g, unknown or other

SEQ ID NO: 1508 - RNA, 43 nt, Artificial Sequence; identical to SEQ ID NO: 1498
  Description of Artificial Sequence: Synthetic oligonucleotide
  modified_base (21)..(43): a, c, u, g, unknown or other

SEQ ID NO: 1509 - RNA, 43 nt, Artificial Sequence; identical to SEQ ID NO: 1498
  Description of Artificial Sequence: Synthetic oligonucleotide
  modified_base (21)..(43): a, c, u, g, unknown or other

SEQ ID NO: 1510 - RNA, 43 nt, Artificial Sequence; identical to SEQ ID NO: 1498
  Description of Artificial Sequence: Synthetic oligonucleotide
  modified_base (21)..(43): a, c, u, g, unknown or other

SEQ ID NO: 1511 - RNA, 43 nt, Artificial Sequence; identical to SEQ ID NO: 1498
  Description of Artificial Sequence: Synthetic oligonucleotide
  modified_base (21)..(43): a, c, u, g, unknown or other

SEQ ID NO: 1512 - RNA, 43 nt, Artificial Sequence; identical to SEQ ID NO: 1498
  Description of Artificial Sequence: Synthetic oligonucleotide
  modified_base (21)..(43): a, c, u, g, unknown or other

SEQ ID NO: 1513 - RNA, 43 nt, Artificial Sequence; identical to SEQ ID NO: 1498
  Description of Artificial Sequence: Synthetic oligonucleotide
  modified_base (21)..(43): a, c, u, g, unknown or other

SEQ ID NO: 1514 - DNA, 27 bp, Artificial Sequence
  Description of Artificial Sequence: Synthetic oligonucleotide
tttccctcactcctgctcggtgaattt

SEQ ID NO: 1515 - DNA, 27 bp, Artificial Sequence
  Description of Artificial Sequence: Synthetic oligonucleotide
tttccctcactcctgctcggtgaattt

SEQ ID NO: 1516 - DNA, 14 bp, Artificial Sequence
  Description of Artificial Sequence: Synthetic oligonucleotide
  modified_base (1)..(1): a, c, t, g, unknown or other
ngccactgttaaaa

SEQ ID NO: 1517 - DNA, 14 bp, Artificial Sequence
  Description of Artificial Sequence: Synthetic oligonucleotide
  modified_base (1)..(1): a, c, t, g, unknown or other
ngccactgttaaaa

SEQ ID NO: 1518 - DNA, 27 bp, Artificial Sequence
  Description of Artificial Sequence: Synthetic oligonucleotide
tttccctcactcctgctcggtgaattt

SEQ ID NO: 1519 - DNA, 27 bp, Artificial Sequence
  Description of Artificial Sequence: Synthetic oligonucleotide
tttccctcactcctgctcggtgaattt

SEQ ID NO: 1520 - protein, 1307 aa, Artificial Sequence; identical to SEQ ID NO: 77
  Description of Artificial Sequence: Synthetic polypeptide

SEQ ID NO: 1521 - protein, 1307 aa, Artificial Sequence; identical to SEQ ID NO: 77
  Description of Artificial Sequence: Synthetic polypeptide

SEQ ID NO: 1522 - protein, 1307 aa, Artificial Sequence; identical to SEQ ID NO: 77
  Description of Artificial Sequence: Synthetic polypeptide

SEQ ID NO: 1523 - protein, 410 aa, Artificial Sequence
  Description of Artificial Sequence: Synthetic polypeptide
EHPETPIIGIDRGERNLIYITVIDSTGKILEQRSLNTIQQFDYQKKLDNREKERVAARQAWSVVGTIKDLKQGYLSQVIHEIVDLMIHYQAVVVLENLNFGFKSKRTGIAEKAVYQQFEKMLIDKLNCLVLKDYPAEKVGGVLNPYQLTDQFTSFAKMGTQSGFLFYVPAPYTSKIDPLTGFVDPFVWKTIKNHESRKHFLEGFDFLHYDVKTGDFILHFKMNRNLSFQRGLPGFMPAWDIVFEKNETQFDAKGTPFIAGKRIVPVIENHRFTGRYRDLYPANELIALLEEKGIVFRDGSNILPKLLENDDSHAIDTMVALIRSVLQMRNSNAATGEDYINSPVRDLNGVCFDSRFQNPEWPMDADANGAYHIALKGQLLLNHLKESKDLKLQNGISNQDWLAYIQELRN

SEQ ID NO: 1524 - protein, 1307 aa, Artificial Sequence; identical to SEQ ID NO: 77
  Description of Artificial Sequence: Synthetic polypeptide

SEQ ID NO: 1525 - protein, 1307 aa, Artificial Sequence; identical to SEQ ID NO: 77
  Description of Artificial Sequence: Synthetic polypeptide

SEQ ID NO: 1526 - protein, 119 aa, Artificial Sequence
  Description of Artificial Sequence: Synthetic polypeptide
FAKGHHGKPNLHTLYWTGLFSPENLAKTSIKLNGQAELFYRPKSRMKRMAHRLGEKMLNKKLKDQKTPIPDTLYQELYDYVNHRLSHDLSDEARALLPNVITKEVSHEIIKDRRFTSDK

SEQ ID NO: 1527 - protein, 119 aa, Artificial Sequence; identical to SEQ ID NO: 1526
  Description of Artificial Sequence: Synthetic polypeptide

SEQ ID NO: 1528 - protein, 48 aa, Artificial Sequence; identical to SEQ ID NO: 1204
  Description of Artificial Sequence: Synthetic polypeptide

SEQ ID NO: 1529 - protein, 48 aa, Artificial Sequence; identical to SEQ ID NO: 1204
  Description of Artificial Sequence: Synthetic polypeptide

SEQ ID NO: 1530 - protein, 48 aa, Artificial Sequence; identical to SEQ ID NO: 1204
  Description of Artificial Sequence: Synthetic polypeptide

SEQ ID NO: 1531 - protein, 48 aa, Artificial Sequence; identical to SEQ ID NO: 1204
  Description of Artificial Sequence: Synthetic polypeptide

SEQ ID NO: 1532 - protein, 48 aa, Artificial Sequence; identical to SEQ ID NO: 1204
  Description of Artificial Sequence: Synthetic polypeptide

SEQ ID NO: 1533 - protein, 48 aa, Artificial Sequence; identical to SEQ ID NO: 1204
  Description of Artificial Sequence: Synthetic polypeptide

SEQ ID NO: 1534 - protein, 48 aa, Artificial Sequence; identical to SEQ ID NO: 1204
  Description of Artificial Sequence: Synthetic polypeptide

SEQ ID NO: 1535 - protein, 48 aa, Artificial Sequence; identical to SEQ ID NO: 1204
  Description of Artificial Sequence: Synthetic polypeptide

SEQ ID NO: 1536 - protein, 48 aa, Artificial Sequence; identical to SEQ ID NO: 1204
  Description of Artificial Sequence: Synthetic polypeptide

SEQ ID NO: 1537 - protein, 48 aa, Artificial Sequence; identical to SEQ ID NO: 1204
  Description of Artificial Sequence: Synthetic polypeptide

SEQ ID NO: 1538 - protein, 48 aa, Artificial Sequence; identical to SEQ ID NO: 1204
  Description of Artificial Sequence: Synthetic polypeptide

SEQ ID NO: 1539 - protein, 48 aa, Artificial Sequence; identical to SEQ ID NO: 1204
  Description of Artificial Sequence: Synthetic polypeptide

SEQ ID NO: 1540 - protein, 48 aa, Artificial Sequence; identical to SEQ ID NO: 1204
  Description of Artificial Sequence: Synthetic polypeptide

SEQ ID NO: 1541 - protein, 48 aa, Artificial Sequence; identical to SEQ ID NO: 1204
  Description of Artificial Sequence: Synthetic polypeptide

SEQ ID NO: 1542 - protein, 48 aa, Artificial Sequence; identical to SEQ ID NO: 1204
  Description of Artificial Sequence: Synthetic polypeptide

SEQ ID NO: 1543 - protein, 48 aa, Artificial Sequence; identical to SEQ ID NO: 1204
  Description of Artificial Sequence: Synthetic polypeptide

SEQ ID NO: 1544 - protein, 48 aa, Artificial Sequence; identical to SEQ ID NO: 1204
  Description of Artificial Sequence: Synthetic polypeptide

SEQ ID NO: 1545 - protein, 48 aa, Artificial Sequence; identical to SEQ ID NO: 1204
  Description of Artificial Sequence: Synthetic polypeptide

SEQ ID NO: 1546 - protein, 48 aa, Artificial Sequence; identical to SEQ ID NO: 1204
  Description of Artificial Sequence: Synthetic polypeptide

SEQ ID NO: 1547 - protein, 48 aa, Artificial Sequence; identical to SEQ ID NO: 1204
  Description of Artificial Sequence: Synthetic polypeptide

SEQ ID NO: 1548 - protein, 48 aa, Artificial Sequence; identical to SEQ ID NO: 1204
  Description of Artificial Sequence: Synthetic polypeptide

SEQ ID NO: 1549 - protein, 48 aa, Artificial Sequence; identical to SEQ ID NO: 1204
  Description of Artificial Sequence: Synthetic polypeptide

SEQ ID NO: 1550 - protein, 48 aa, Artificial Sequence; identical to SEQ ID NO: 1204
  Description of Artificial Sequence: Synthetic polypeptide

SEQ ID NO: 1551 - protein, 48 aa, Artificial Sequence; identical to SEQ ID NO: 1204
  Description of Artificial Sequence: Synthetic polypeptide

SEQ ID NO: 1552 - protein, 48 aa, Artificial Sequence; identical to SEQ ID NO: 1204
  Description of Artificial Sequence: Synthetic polypeptide

SEQ ID NO: 1553 - protein, 48 aa, Artificial Sequence; identical to SEQ ID NO: 1204
  Description of Artificial Sequence: Synthetic polypeptide

SEQ ID NO: 1554 - protein, 48 aa, Artificial Sequence; identical to SEQ ID NO: 1204
  Description of Artificial Sequence: Synthetic polypeptide

SEQ ID NO: 1555 - protein, 48 aa, Artificial Sequence; identical to SEQ ID NO: 1204
  Description of Artificial Sequence: Synthetic polypeptide

SEQ ID NO: 1556 - protein, 48 aa, Artificial Sequence; identical to SEQ ID NO: 1204
  Description of Artificial Sequence: Synthetic polypeptide

SEQ ID NO: 1557 - protein, 48 aa, Artificial Sequence; identical to SEQ ID NO: 1204
  Description of Artificial Sequence: Synthetic polypeptide

SEQ ID NO: 1558 - protein, 48 aa, Artificial Sequence; identical to SEQ ID NO: 1204
  Description of Artificial Sequence: Synthetic polypeptide

SEQ ID NO: 1559 - protein, 48 aa, Artificial Sequence; identical to SEQ ID NO: 1204
  Description of Artificial Sequence: Synthetic polypeptide

SEQ ID NO: 1560 - protein, 48 aa, Artificial Sequence; identical to SEQ ID NO: 1204
  Description of Artificial Sequence: Synthetic polypeptide

SEQ ID NO: 1561 - protein, 48 aa, Artificial Sequence; identical to SEQ ID NO: 1204
  Description of Artificial Sequence: Synthetic polypeptide

SEQ ID NO: 1562 - protein, 48 aa, Artificial Sequence; identical to SEQ ID NO: 1204
  Description of Artificial Sequence: Synthetic polypeptide

SEQ ID NO: 1563 - protein, 48 aa, Artificial Sequence; identical to SEQ ID NO: 1204
  Description of Artificial Sequence: Synthetic polypeptide

SEQ ID NO: 1564 - protein, 48 aa, Artificial Sequence; identical to SEQ ID NO: 1204
  Description of Artificial Sequence: Synthetic polypeptide

SEQ ID NO: 1565 - protein, 48 aa, Artificial Sequence; identical to SEQ ID NO: 1204
  Description of Artificial Sequence: Synthetic polypeptide

SEQ ID NO: 1566 - protein, 48 aa, Artificial Sequence; identical to SEQ ID NO: 1204
  Description of Artificial Sequence: Synthetic polypeptide

SEQ ID NO: 1567 - protein, 48 aa, Artificial Sequence; identical to SEQ ID NO: 1204
  Description of Artificial Sequence: Synthetic polypeptide

SEQ ID NO: 1568 - protein, 48 aa, Artificial Sequence; identical to SEQ ID NO: 1204
  Description of Artificial Sequence: Synthetic polypeptide

SEQ ID NO: 1569 - protein, 48 aa, Artificial Sequence; identical to SEQ ID NO: 1204
  Description of Artificial Sequence: Synthetic polypeptide

SEQ ID NO: 1570 - protein, 48 aa, Artificial Sequence; identical to SEQ ID NO: 1204
  Description of Artificial Sequence: Synthetic polypeptide

SEQ ID NO: 1571 - protein, 48 aa, Artificial Sequence; identical to SEQ ID NO: 1204
  Description of Artificial Sequence: Synthetic polypeptide

SEQ ID NO: 1572 - protein, 48 aa, Artificial Sequence; identical to SEQ ID NO: 1204
  Description of Artificial Sequence: Synthetic polypeptide

SEQ ID NO: 1573 - protein, 48 aa, Artificial Sequence; identical to SEQ ID NO: 1204
  Description of Artificial Sequence: Synthetic polypeptide

SEQ ID NO: 1574 - protein, 48 aa, Artificial Sequence; identical to SEQ ID NO: 1204
  Description of Artificial Sequence: Synthetic polypeptide

SEQ ID NO: 1575 - protein, 48 aa, Artificial Sequence; identical to SEQ ID NO: 1204
  Description of Artificial Sequence: Synthetic polypeptide

SEQ ID NO: 1576 - protein, 48 aa, Artificial Sequence; identical to SEQ ID NO: 1204
  Description of Artificial Sequence: Synthetic polypeptide

SEQ ID NO: 1577 - protein, 48 aa, Artificial Sequence; identical to SEQ ID NO: 1204
  Description of Artificial Sequence: Synthetic polypeptide

SEQ ID NO: 1578 - protein, 48 aa, Artificial Sequence; identical to SEQ ID NO: 1204
  Description of Artificial Sequence: Synthetic polypeptide

SEQ ID NO: 1579 - protein, 48 aa, Artificial Sequence; identical to SEQ ID NO: 1204
  Description of Artificial Sequence: Synthetic polypeptide

SEQ ID NO: 1580 - DNA, 19 bp, Artificial Sequence
  Description of Artificial Sequence: Synthetic oligonucleotide
aatttctactgctgtagat

SEQ ID NO: 1581 - protein, 1206 aa, Artificial Sequence; identical to SEQ ID NO: 115
  Description of Artificial Sequence: Synthetic polypeptide
